(19) United States
(12) Patent Application Publication
(10) Pub. No.: US 2026/0137723 A1
(43) Pub. Date: May 21, 2026

(54) DEPRIVATION OF HUMAN PLURIPOTENT STEM CELL-DERIVED TRPV1+, MRGPRX1+ AND SCN9A+ SENSORY NEURONS AND THEIR FUNCTIONAL CHARACTERIZATION

(71) Applicant: The Johns Hopkins University, Baltimore, MD (US)

(72) Inventors: Gabsang LEE, Baltimore, MD (US); Xinzhong DONG, Baltimore, MD (US); Zhuolun Poppy WANG, Baltimore, MD (US)

(73) Assignee: The Johns Hopkins University, Baltimore, MD (US)

(21) Appl. No.: 19/385,524

(22) Filed: Nov. 11, 2025

Related U.S. Application Data
(63) Continuation-in-part of application No. PCT/US2024/056429, filed on Nov. 18, 2024.
(60) Provisional application No. 63/599,832, filed on Nov. 16, 2023.

(51) Int. Cl. A61K 35/30; A61P 19/02; C12N 5/0793; C12N 9/22; C12N 15/11

(52) U.S. Cl. CPC A61K 35/30; A61P 19/02; C12N 5/062; C12N 9/226; C12N 15/11; C12N 2310/20; C12N 2506/45

(57) ABSTRACT

Provided herein are methods of producing a population of pluripotent stem cell-derived sensory neurons (PSC-SNs) expressing a target gene associated with pain. In addition, provided herein are compositions and methods comprising populations of pluripotent stems cells for treating pain, osteoarthritis, and osteoarthritis related conditions.

### CROSS-REFERENCE TO RELATED APPLICATIONS

[0001] This application is a continuation-in-part of International Application No. PCT/US2024/056429 filed on Nov. 18, 2024, which claims priority to U.S. Application No. 63/599,832 filed on Nov. 16, 2023, this disclosure of which are hereby incorporated by reference in their entireties for all purposes.

### REFERENCE TO AN ELECTRONIC SEQUENCE LISTING

[0002] The contents of the electronic sequence listing (SENE_001_00US_SeqList_ST26.xml; Size: 676,224 bytes; and Date of Creation: Oct. 17, 2025) are herein incorporated by reference in its entirety.

### FIELD OF DISCLOSURE

[0003] The present disclosure relates generally to the fields of pain relief, joint pain, and osteoarthritis. More specifically, the present disclosure relates to populations of pluripotent stem cell-derived sensory neurons (PSC-SNs) expressing a target gene associated with pain or enriched for a biomarker. The disclosure further relates to methods of treating nociceptive pain, chronic pain, pruriception, and a nociceptive- or pruriceptive-mediated condition in a sensory neuron (SN).

### BACKGROUND

[0004] Chronic pain arises from the complex interplay of inflammatory signals that activate and sensitize nociceptors within injured tissues. The clinical failure of most analgesics stems from their mono-targeted mechanisms, which cannot modulate the diverse known and unknown pathways driving chronic pain. There is a critical need to evaluate pluripotent stem cell-derived sensory neurons (PSC-SNs) beyond conventional regenerative therapies. Rather than replacing damaged tissue, PSC-SNs can function as therapeutic agents targeting both the symptoms and pathogenesis of pain-related conditions. Moreover, this potential therapy provides a multi-targeted approach for chronic pain and a disease-modifying treatment for osteoarthritis, in which PSC-NNs can alleviate pain and support joint repair. Overall, these novel therapies offer strong potential for clinical translation in the treatment of chronic pain and bone-related disorders.

### BRIEF SUMMARY

[0005] In one aspect, provided herein is an isolated population of cells comprising pluripotent stem cell-derived sensory neurons (PSC-SNs) expressing at least one sensory neuron or pan neuronal marker. In some embodiments, the PSC-SNs respond to a nociceptive and pruriceptive stimulus. In some embodiments, the cells express TRPV1, SCN9A, MRGPRX1, or KCNQ2. In some embodiments, the cells express CD200^{high}. In some embodiments, at least 40%, at least 45%, at least 50%, at least 55%, at least 60%, at least 65%, at least 70%, at least 75%, at least 80%, at least 85%, at least 90%, at least 95%, at least 99% or 100% of the cells are CD200^{high}. In some embodiments, the PSC-SNs are derived from an animal or a human (hPSC-SNs). In some embodiments, the PSC-SNs comprise pluripotent stem cell-derived nociceptive sensory neurons (PSC-NSNs).

[0006] In another aspect, provided herein is a composition comprising the cells described herein, and at least one excipient.

[0007] In another aspect, provided herein is a method of treating pain or osteoarthritis, and/or promoting healing of injured tissues in a subject thereof, wherein the method comprises administering the cells described herein to the subject. In some embodiments, the method comprises administering to a joint of the subject. In some embodiments, the joint is a knee joint. In some embodiments, the pain comprises chronic pain, nociceptive pain, or pruriceptive pain. In some embodiments, the cells are administered to the subject at multiple intervals. In some embodiments, the subject is an animal or human. In some embodiments, the treated subject exhibits a reduction in pain by at least about 10%, at least about 20%, at least about 30%, at least about 40%, at least about 50%, at least about 60%, at least about 70%, at least about 80%, at least about 90%, or 100% in comparison to the subject prior to treatment or an untreated subject. In some embodiments, the treated subject exhibits a reduction in mechanical hypersensitivity by at least about 10%, at least about 20%, at least about 30%, at least about 40%, at least about 50%, at least about 60%, at least about 70%, at least about 80%, at least about 90%, or 100% in comparison to the subject prior to treatment or an untreated subject. In some embodiments, the treated subject exhibits a reduction in expression of matrix metalloproteinase 13 (MMP13) by at least about 10%, at least about 20%, at least about 30%, at least about 40%, at least about 50%, at least about 60%, at least about 70%, at least about 80%, at least about 90%, or 100% in comparison to the subject prior to treatment or an untreated subject.

[0008] In another aspect, provided herein is a composition for base editing target gene mutations, wherein the composition comprises a base editor and a guide RNA (gRNA) targeting at least one gene, wherein the at least one target gene comprises SCN9A, TRPV1, MRGPRX1, or KCNQ2. In some embodiments, the gRNA comprises a sequence selected from any one of SEQ ID NOs: 82-97. In some embodiments, the gRNA comprises a spacer sequence selected from any one of SEQ ID NOs: 17, 22, 27, 32, 35, 38, 41, 44, 47, 50, 53, 56, or 59-81. In some embodiments, the base editor comprises ABE8e, ABE8e(V106W), ABE9, ABE20, ABE7.10, SaKKHABE8e, SauriCas9-ABE8e, CjCas9-ABE8e, Nme2Cas9-ABE8e, or SaCas9-ABE8e. In some embodiments, the base editor comprises Cas9 endonuclease. In some embodiments, the Cas9 endonuclease comprises Type II Cas9.

[0009] In another aspect, provided herein is a method of editing at least one target gene comprising the composition described herein.

[0010] In another aspect, provided herein is a method of producing an isolated population of cells, wherein the population of cells comprises cells described herein, the method comprising contacting the cells with a composition for base editing target gene mutations, wherein the composition comprises a system comprising a base editor and a gRNA targeting at least one gene. In some embodiments, the cells have altered expression of the at least one target gene. In some embodiments, the cells have altered expression of the at least one target gene. In some embodiments, the least one target gene comprises SCN9A, TRPV1, MRGPRX1, or KCNQ2. In some embodiments, the gRNA comprises a sequence selected from any one of SEQ ID NOs: 82-97. In some embodiments, the gRNA comprises a spacer sequence selected from any one of SEQ ID NOs: 17, 22, 27, 32, 35, 38, 41, 44, 47, 50, 53, 56, or 59-81. In some embodiments, the base editor comprises ABE8e, ABE8e(V106W), ABE9, ABE20, ABE7.10, SaKKHABE8e, SauriCas9-ABE8e, CjCas9-ABE8e, Nme2Cas9-ABE8e, or SaCas9-ABE8e. In some embodiments, the base editor comprises Cas9 endonuclease. In some embodiments, the Cas9 endonuclease comprises Type II Cas9.

[0011] In another aspect, provided herein is a composition for base editing KCNQ2 mutations, wherein the composition comprises a system comprising a base editor and a gRNA targeting KCNQ2. In some embodiments, the gRNA comprises a sequence of SEQ ID NO: 83. In some embodiments, the gRNA comprises a spacer sequence selected from any one of SEQ ID NOs: 32, 35, 38, 41, 44, 47, 50, 53, 56, or 59-81. In some embodiments, the base editor comprises ABE8e, ABE8e(V106W), ABE9, ABE20, ABE7.10, SaKKHABE8e, SauriCas9-ABE8e, CjCas9-ABE8e, Nme2Cas9-ABE8e, or SaCas9-ABE8e.

[0012] In another aspect, provided herein is a method of editing KCNQ2 mutations comprising the composition described herein. In some embodiments, KCNQ2 function is restored. In some embodiments, the KCNQ2 mutations comprises a p.T730A or c.2188A>G mutation.

[0013] In another aspect, provided herein is a composition for silencing expression of TRPV1 and SCN9A, wherein the composition comprises a system comprising a Cas9 endonuclease and a gRNA targeting TRPV1 and SCN9A. In some embodiments, the gRNA comprises a sequence of SEQ ID NO: 86, 89-92, or 97. In some embodiments, the gRNA comprises a spacer sequence selected from any one of SEQ ID NOs: 22 or 27. In some embodiments, the Cas9 endonuclease comprises Type II Cas9.

[0014] In another aspect, provided herein is a method of editing TRPV1 or SCN9A comprising the composition described herein. In some embodiments, TRPV1 or SCN9A expression is reduced or eliminated.

[0015] In another aspect, provided herein is a method of producing an isolated population of cells comprising human pluripotent stem cell-derived nociceptive sensory neurons (hPSC-NSNs) expressing CD200^{high} with altered expression of KCNQ2, TRPV1, or SCN9A. In some embodiments, the cells are contacted with a composition for base editing KCNQ2 mutations, wherein the composition comprises a system comprising a base editor and a gRNA targeting KCNQ2. In some embodiments, the gRNA comprises a sequence of SEQ ID NO: 83. In some embodiments, the gRNA comprises a spacer sequence selected from any one of SEQ ID NOs: 32, 35, 38, 41, 44, 47, 50, 53, 56, or 59-81. In some embodiments, the base editor comprises ABE8e, ABE8e(V106W), ABE9, ABE20, ABE7.10, SaKKHABE8e, SauriCas9-ABE8e, CjCas9-ABE8e, Nme2Cas9-ABE8e, or SaCas9-ABE8e. In some embodiments, the cells are contacted with a composition for silencing expression of TRPV1 and SCN9A, wherein the composition comprises a system comprising a Cas9 endonuclease and a gRNA targeting TRPV1 and SCN9A. In some embodiments, the gRNA comprises a sequence of SEQ ID NO: 86, 89-92, or 97. In some embodiments, the gRNA comprises a spacer sequence selected from any one of SEQ ID NOs: 22 and 27. In some embodiments, the Cas9 endonuclease comprises Type II Cas9.

### BRIEF DESCRIPTION OF THE DRAWINGS

[0016] The accompanying figures, which are incorporated herein and form a part of the specification, illustrate some, but not the only or exclusive, example embodiments and/or features. It is intended that the embodiments and figures disclosed herein are to be considered illustrative rather than limiting.

[0017] FIGS. 1A-1D illustrate generating PSC reporter lines.

[0018] FIGS. 2A-2E illustrate characterizing the transcriptional landscape of MRGPRX1::GFP, SCN9A::GFP, and TRPV1::GFP sensory neurons.

[0019] FIGS. 3A-3F illustrate purifiable and excitable populations of hPSC-derived MRGPRX1+ and TRPV1+ sensory neurons.

[0020] FIGS. 4A-4L illustrate FACS-purified TRPV1+, SCN9A+, and MRGPRX1+ hPSC-derived sensory neurons responding to various pain- and itch-inducing ligands.

[0021] FIGS. 5A-5S illustrate in vitro optimization and functional validation of candidate CRISPR sgRNAs to enable TRPV1 knockout, and SCN9A knockout.

[0022] FIGS. 6A-6I illustrate single cell RNA-seq data and CD200 as a nociceptor marker.

[0023] FIGS. 7A-7DD illustrate a KCNQ2 as a gene therapy target gene conferring robust pain-resilience effects in hPSC-derived sensory neurons and the KCNQ2 gene therapy efficacy in a rodent model resulting in bone remodeling.

[0024] FIGS. 8A-8R illustrate CD200+ sensory neuron injection to intercept pain to treat localized pain and improve the bone remodeling by injecting hPSC-derived pain-sensing neurons.

[0025] FIGS. 9A-9K illustrate in vivo survival and function of SCN9A+, TRPV1+, and MRGPRX1+ neurons.

[0026] FIGS. 10A-10I show CD200^{high} hPSC-NNs promote healthy joint homeostasis by depleting inflammatory factors and secreting factors that facilitate tissue repair.

[0027] FIG. 10A shows Expression of ATF3 (red) in transplanted CD200^{low} hPSC-SNs and CD200^{high} hPSC-NNs (green) in knee sections at 5 and 10 weeks post-injection (scale bar, 10 μm). FIG. 10C shows a quantification of the proportion of CD200^{low} hPSC-SNs or CD200^{high} hPSC-NNs expressing ATF3.9

[0028] FIG. 10B shows representative Ca²⁺ transients of CD200^{low} hPSC-SNs and CD200^{high} hPSC-NNs acutely exposed to osteoarthritis (OA) hSF or pooled. FIG. 10 D shows Quantification of portion of responsive neurons.

[0029] FIG. 10E shows a schematic workflow of proteomic analysis of supernatants from CD200^{high} hPSC-NNs and CD200^{low} hPSC-SNs following overnight incubation with OA hSF or pooled healthy hSF healthy hSF (bold traces show the mean).

[0030] FIGS. 10F-10G show a reactome pathway analysis showing downregulated (FIG. 10F) and upregulated (FIG. 10G) pathways in CD200^{high} hPSC-NNs versus CD200^{low} hPSC-SNs incubated in OA hSF.

[0031] FIGS. 10H-10I show volcano plots of proteins depleted (FIG. 10H) or enriched (FIG. 10I) in OA hSF following incubation with CD200^{high} hPSC-NNs versus CD200^{low} hPSC-SNs.

[0032] FIGS. 11A-11I CD200^{high} hPSC-NNs restored the disrupted proteome in OA mice, promoting an anti-inflammatory and reparative microenvironment.

[0033] FIG. 11A shows a schematic workflow of proteomic analysis of knee joints harvested 10 weeks post-injection from ACLT animals injected with viable CD200^{high} hPSC-NNs (ACLT-CD200^{high}), ACLT animals injected with heat-killed hPSC-SNs (ACLT-heat killed), and sham-operated animals injected with heat-killed hPSC-SNs (sham-heat killed). FIG. 11B shows a venn diagram exhibiting differentially expressed proteins, highlighting similarity between the proteomes of sham-heat killed and ACLT-CD200^{high} animals. FIG. 11C shows a schematic representation of the dual mechanism of action of CD200^{high} hPSC-NNs in OA mice.

[0034] FIG. 11D shows volcano plots of proteins enriched in ACLT-heat killed versus sham-heat killed animals (left) and reversed by CD200^{low} hPSC-NNs 10 weeks post-injection (right) (shared proteins are boxed). FIG. 11E shows volcano plots of proteins downregulated in ACLT-heat killed versus sham-heat killed animals (left) and restored by CD200^{high} hPSC-NNs 10 weeks post-injection (right) (shared proteins are boxed).

[0035] FIGS. 11F and 11G show reactome pathways enriched in ACLT-heat killed versus sham-heat killed animals (FIG. 11F) and reversed by CD200^{high} hPSC-NNs 10 weeks post-injection (FIG. 11G). FIGS. 11H and 11I show reactome pathways downregulated in ACLT-heat killed versus sham-heat killed animals (FIG. 1111) and restored by CD200^{high} hPSC-NNs 10 weeks post-injection (FIG. 11I).

[0036] FIG. 12 shows the CRISPR-Cas9 ribonucleoprotein (RNP) and homology-directed recombination (HDR) template design. The PAM sequence is labeled in blue, restriction enzyme sites are shown in yellow, and the genomic sequence is shown in green. A silent mutagenesis is designed on the right homology arm for the TRPV1 locus. The PAM sequence for all loci is designed to be located within 10 bp of the insertion site.

[0037] FIGS. 13A-H show animal models and results for evaluation of a targeted base editor.

### DETAILED DESCRIPTION

[0038] All publications, patents and patent applications, including any drawings and appendices, are herein incorporated by reference to the same extent as if each individual publication or patent application was specifically and individually indicated to be incorporated by reference.

[0039] The following description includes information that may be useful in understanding the present disclosure. It is not an admission that any of the information provided herein is prior art or relevant to the presently claimed disclosures, or that any publication specifically or implicitly referenced is prior art.

### Definitions

[0040] The terms, “a,” “an,” and “the,” as used herein, include plural references unless the context clearly dictates otherwise.

[0041] The terms, “or” and “and/or,” as used herein, include any, and all, combinations of one or more of the associated listed items.

[0042] The terms, “including,” “includes,” “included,” and other forms, are not limiting.

[0043] The terms, “comprise” and its grammatical equivalents, as used herein, specify the presence of stated features, integers, steps, operations, elements, and/or components, but do not preclude the presence or addition of one or more other features, integers, steps, operations, elements, components, and/or groups thereof.

[0044] The term, “about,” as used herein in reference to a number or range of numbers, is understood to mean the stated number and numbers +/−10% thereof, or 10% below the lower listed limit and 10% above the higher listed limit for the values listed for a range.

[0045] The term “base editing enzyme,” as used herein, refers to a protein, polypeptide or fragment thereof that is capable of catalyzing the chemical modification of a nucleobase of a deoxyribonucleotide or a ribonucleotide. Such a base editing enzyme, for example, is capable of catalyzing a reaction that modifies a nucleobase that is present in a nucleic acid molecule, such as DNA or RNA (single stranded or double stranded). Non-limiting examples of the type of modification that a base editing enzyme is capable of catalyzing includes converting an existing nucleobase to a different nucleobase, such as converting a cytosine to a guanine or thymine or converting an adenine to a guanine, hydrolytic deamination of an adenine or adenosine, or methylation of cytosine (e.g., CpG, CpA, CpT or CpC). A base editing enzyme itself may or may not bind to the nucleic acid molecule containing the nucleobase.

[0046] The term “base editor,” as used herein, refers to a fusion protein comprising a base editing enzyme linked to an effector protein. The base editing enzyme may be referred to as a fusion partner. The base editing enzyme can differ from a naturally occurring base editing enzyme. It is understood that any reference to a base editing enzyme herein also refers to a base editing enzyme variant. The base editor is functional when the effector protein is coupled to a guide nucleic acid. The guide nucleic acid imparts sequence specific activity to the base editor. By way of non-limiting example, the effector protein may comprise a catalytically inactive effector protein. Also, by way of non-limiting example, the base editing enzyme may comprise deaminase activity. Additional base editors are described herein.

[0047] The terms “complementary” and “complementarity,” as used herein, with reference to a nucleic acid molecule or nucleotide sequence, refer to the characteristic of a polynucleotide having nucleotides that base pair with their Watson-Crick counterparts (C with G; or A with T or U) in a reference nucleic acid. For example, when every nucleotide in a polynucleotide forms a base pair with a reference nucleic acid, that polynucleotide is said to be 100% complementary to the reference nucleic acid. In a double stranded DNA or RNA sequence, the upper (sense) strand sequence is in general, understood as going in the direction from its 5′- to 3′-end, and the complementary sequence is thus understood as the sequence of the lower (antisense) strand in the same direction as the upper strand. Following the same logic, the reverse sequence is understood as the sequence of the upper strand in the direction from its 3′- to its 5′-end, while the ‘reverse complement’ sequence or the ‘reverse complementary’ sequence is understood as the sequence of the lower strand in the direction of its 5′- to its 3′-end. Each nucleotide in a double stranded DNA or RNA molecule that is paired with its Watson-Crick counterpart called its complementary nucleotide.

[0048] The term “cis cleavage,” as used herein, refers to cleavage (hydrolysis of a phosphodiester bond) of a target nucleic acid by an effector protein complexed with a guide nucleic acid (e.g., an RNP complex), wherein at least a portion of the guide nucleic acid is hybridized to at least a portion of the target nucleic acid. Cleavage may occur within or directly adjacent to the region of the target nucleic acid that is hybridized to the guide nucleic acid.

[0049] The term “cleavage assay,” as used herein, refers to an assay designed to visualize, quantitate, or identify cleavage of a nucleic acid. In some cases, the cleavage activity may be cis-cleavage activity. In some cases, the cleavage activity may be trans-cleavage activity.

[0050] The terms “cleave,” “cleaving,” and “cleavage,” as used herein, with reference to a nucleic acid molecule or nuclease activity of an effector protein, refer to the hydrolysis of a phosphodiester bond of a nucleic acid molecule that results in breakage of that bond. The result of this breakage can be a nick (hydrolysis of a single phosphodiester bond on one side of a double-stranded molecule), single strand break (hydrolysis of a single phosphodiester bond on a single-stranded molecule) or double strand break (hydrolysis of two phosphodiester bonds on both sides of a double-stranded molecule) depending upon whether the nucleic acid molecule is single-stranded (e.g., ssDNA or ssRNA) or double-stranded (e.g., dsDNA) and the type of nuclease activity being catalyzed by the effector protein.

[0051] The term “clustered regularly interspaced short palindromic repeats (CRISPR),” as used herein, refers to a segment of DNA found in the genomes of certain prokaryotic organisms, including some bacteria and archaea, that includes repeated short sequences of nucleotides interspersed at regular intervals between unique sequences of nucleotides derived from the DNA of a pathogen (e.g., virus) that had previously infected the organism and that functions to protect the organism against future infections by the same pathogen.

[0052] The terms “CRISPR RNA” or “crRNA,” as used herein, refer to a type of guide nucleic acid, wherein the nucleic acid is RNA comprising a first sequence that is capable of interacting with an effector protein either directly (by being bound by an effector protein) or indirectly (e.g., by hybridization with a second nucleic acid molecule that can be bound by an effector, such as a tracrRNA); and a second sequence that hybridizes to a target sequence of a target nucleic acid. In some embodiments, the first sequence is referred to as a repeat sequence and the second sequence is referred to as a spacer sequence. The first sequence and the second sequence are directly connected to each other or by a linker.

[0053] The terms “expression unit” and “expression cassette” are used interchangeably herein and denote a nucleic acid segment encoding a polypeptide of interest and capable of providing expression of the nucleic acid segment in a host cell. An expression unit typically comprises a transcription promoter, an open reading frame encoding the polypeptide of interest, and a transcription terminator, all in operable configuration. In addition to a transcriptional promoter and terminator, an expression unit can further include other nucleic acid segments such as, e.g., an enhancer or a polyadenylation signal. In certain embodiments, for example, an “expression cassette” comprises a DNA coding sequence operably linked to a promoter. “Operably linked” refers to a juxtaposition wherein the components so described are in a relationship permitting them to function in their intended manner. For instance, a promoter is operably linked to a coding sequence (or the coding sequence can also be said to be operably linked to the promoter) if the promoter affects its transcription or expression. In certain embodiments, for example, an expression cassette may be a genetic sequence within a vector which can express an RNA, and subsequently a protein. The nucleic acid cassette contains the gene of interest, e.g., a gene-regulating system. The nucleic acid cassette is positionally and sequentially oriented within the vector such that the nucleic acid in the cassette can be transcribed into RNA, and when necessary, translated into a protein or a polypeptide, undergo appropriate post-translational modifications required for activity in the transformed cell, and be translocated to the appropriate compartment for biological activity by targeting to appropriate intracellular compartments or secretion into extracellular compartments. Preferably, the cassette has its 3′ and 5′ ends adapted for ready insertion into a vector, e.g., it has restriction endonuclease sites at each end. The cassette can be removed and inserted into a plasmid or viral vector as a single unit

[0054] The terms “fusion protein,” or “fusion effector protein,” as used herein, refer to a protein comprising at least two heterologous polypeptides. The fusion protein may comprise one or more effector proteins and fusion partners. In some embodiments, an effector protein and fusion partner are not found connected to one another as a native protein or complex that occurs together in nature.

[0055] The term “functional domain,” as used herein, refers to a region of one or more amino acids in a protein that is required for an activity of the protein, or the full extent of that activity, as measured in an in vitro assay. Activities include, but are not limited to nucleic acid binding, nucleic acid modification, nucleic acid cleavage, protein binding. The absence of the functional domain, including mutations of the functional domain, would abolish or reduce activity.

[0056] The term “guide nucleic acid,” as used herein, refers to a nucleic acid comprising: a first nucleotide sequence that is capable of being non-covalently bound by an effector protein; and a second nucleotide sequence that hybridizes to a target nucleic acid. When in a complex with one or more polypeptides described herein (e.g., an RNP complex), a guide nucleic acid can impart sequence selectivity to the complex when the complex interacts with a target nucleic acid. The first sequence may be referred to herein as a repeat sequence. The second sequence may be referred to herein as a spacer sequence. The term, “guide nucleic acid,” may be used interchangeably herein with the term “guide RNA” (gRNA) however it is understood that guide nucleic acids may comprise deoxyribonucleotides (DNA), ribonucleotides (RNA), a combination thereof (e.g., RNA with a thymine base), biochemically or chemically modified nucleobases (e.g., one or more engineered modifications described herein), or combinations thereof.

[0057] The term “heterologous,” as used herein, means a nucleotide or polypeptide sequence that is not found in a native nucleic acid or protein, respectively. In some embodiments, fusion proteins comprise an effector protein and a fusion partner protein, wherein the fusion partner protein is heterologous to an effector protein. These fusion proteins may be referred to as a “heterologous protein.” A protein that is heterologous to the effector protein is a protein that is not covalently linked via an amide bond to the effector protein in nature. In some embodiments, a heterologous protein is not encoded by a species that encodes the effector protein. In some embodiments, the heterologous protein exhibits an activity (e.g., enzymatic activity) when it is linked to the effector protein. In some embodiments, the heterologous protein exhibits increased or reduced activity (e.g., enzymatic activity) when it is linked to the effector protein, relative to when it is not linked to the effector protein. In some embodiments, the heterologous protein exhibits an activity (e.g., enzymatic activity) that it does not exhibit when it is linked to the effector protein. A guide nucleic acid may comprise a first sequence and a second sequence, wherein the first sequence and the second sequence are not found covalently linked via a phosphodiester bond in nature. Thus, the first sequence is considered to be heterologous with the second sequence, and the guide nucleic acid may be referred to as a heterologous guide nucleic acid.

[0058] The term “linked” when used in reference to biopolymers (e.g., nucleic acids, polypeptides) refers to being covalently connected. In some embodiments, two polymers are linked by at least a covalent bond. In some embodiments, two nucleic acids are linked by at least one nucleotide. In some embodiments, two nucleic acids are linked by at least one amino acid. The terms “fused” and “linked” are used interchangeably herein.

[0059] The term “linker,” as used herein, refers to a covalent bond or molecule that links a first polypeptide to a second polypeptide (e.g., by an amide bond, or one or more amino acids) or a first nucleic acid to a second nucleic acid (e.g., by a phosphodiester bond, or one or more nucleotides).

[0060] The term “modified target nucleic acid,” as used herein, refers to a target nucleic acid, wherein the target nucleic acid has undergone a modification, for example, after contact with an effector protein. In some cases, the modification is an alteration in the sequence of the target nucleic acid. In some cases, the modified target nucleic acid comprises an insertion, deletion, or replacement of one or more nucleotides compared to the unmodified target nucleic acid.

[0061] The terms “non-naturally occurring” and “engineered,” as used herein, are used interchangeably and indicate the involvement of the hand of man. The terms, when referring to a nucleic acid, nucleotide, protein, polypeptide, peptide or amino acid, refer to a nucleic acid, nucleotide, protein, polypeptide, peptide or amino acid that is at least substantially free from at least one other feature with which it is naturally associated in nature and as found in nature, and/or contains a modification (e.g., chemical modification, nucleotide sequence, or amino acid sequence) that is not present in the naturally occurring nucleic acid, nucleotide, protein, polypeptide, peptide, or amino acid. The terms, when referring to a composition or system described herein, refer to a composition or system having at least one component that is not naturally associated with the other components of the composition or system. By way of a non-limiting example, a composition may include an effector protein and a guide nucleic acid that do not naturally occur together. Conversely, and as a non-limiting further clarifying example, an effector protein or guide nucleic acid that is “natural,” “naturally-occurring,” or “found in nature” includes an effector protein and a guide nucleic acid from a cell or organism that have not been genetically modified by the hand of man.

[0062] The term “nucleic acid expression vector,” as used herein, refers to a nucleic acid that can be used to express a nucleic acid of interest.

[0063] The term “nuclear localization signal (NLS),” as used herein, refers to an entity (e.g., peptide) that facilitates localization of a nucleic acid, protein, or small molecule to the nucleus, when present in a cell that contains a nuclear compartment.

[0064] The term “nuclease activity,” as used herein, refers to the catalytic activity that results in nucleic acid cleavage (e.g., ribonuclease activity (ribonucleic acid cleavage), or deoxyribonuclease activity (deoxyribonucleic acid cleavage), etc.).

[0065] The terms “partner protein,” “fusion partner,” or “fusion partner protein” as used herein, refer to a protein, polypeptide or peptide that is linked to an effector protein or capable of being proximal to an effector protein. In some embodiments, a fusion partner that is capable of being proximal to an effector protein is a fusion partner that is capable of binding a guide nucleic acid, wherein the effector protein is also capable of binding the guide nucleic acid. In some embodiments, a fusion partner directly interacts with (e.g., binds to/by) an effector protein. In some embodiments, a fusion partner indirectly interacts with an effector protein (e.g., through another protein or moiety).

[0066] The term “pharmaceutically acceptable excipient, carrier or diluent,” as used herein, refers to any substance formulated alongside the active ingredient of a pharmaceutical composition that allows the active ingredient to retain biological activity and is non-reactive with the subject's immune system. Such a substance can be included for the purpose of long-term stabilization, bulking up solid formulations that contain potent active ingredients in small amounts, or to confer a therapeutic enhancement on the active ingredient in the final dosage form, such as facilitating absorption, reducing viscosity, or enhancing solubility. The selection of appropriate substance can depend upon the route of administration and the dosage form, as well as the active ingredient and other factors. Compositions having such substances can be formulated by well-known conventional methods (see, e.g., Remington, The Science and Practice of Pharmacy 23^{rd} edition, A. Adejare, ed., Elsevier Publishing Co., 2020).

[0067] The terms, “promoter” and “promoter sequence,” as used herein, refer to a DNA regulatory region capable of binding RNA polymerase and initiating transcription of a downstream (3′ direction) coding or non-coding sequence. A transcription initiation site, as well as protein binding domains responsible for the binding of RNA polymerase, can also be found in a promoter region. Eukaryotic promoters will often, but not always, contain “TATA” boxes and “CAT” boxes. Various promoters, including inducible promoters, may be used to drive expression by the various vectors of the present disclosure.

[0068] The term “protospacer adjacent motif” and “PAM,” as used herein, refers to a nucleotide sequence found in a target nucleic acid that directs an effector protein to modify the target nucleic acid at a specific location. In some embodiments, a PAM sequence is required for a complex of an effector protein and a guide nucleic acid (e.g., an RNP complex) to hybridize to and edit the target nucleic acid. In some embodiments, the complex does not require a PAM to edit the target nucleic acid.

[0069] In some embodiments, the term “region” as used herein may be used to describe a portion of, or all of, a corresponding sequence, for example, a spacer region is understood to comprise a portion of or all of a spacer sequence.

[0070] The term, “regulatory element,” used herein, refers to transcriptional and translational control sequences, such as promoters, enhancers, polyadenylation signals, terminators, protein degradation signals, and the like, that provide for and/or regulate transcription of a non-coding sequence (e.g., a guide nucleic acid) or a coding sequence (e.g., effector proteins, fusion proteins, and the like) and/or regulate translation of an encoded polypeptide.

[0071] The term, “repeat sequence,” as used herein, refers to a sequence of nucleotides in a guide nucleic acid that is capable of, at least partially, interacting with an effector protein.

[0072] The terms, “ribonucleotide protein complex” and “RNP” as used herein, refer to a complex of one or more nucleic acids and one or more polypeptides described herein. While the term utilizes “ribonucleotides” it is understood that the one or more nucleic acid may comprise deoxyribonucleotides (DNA), ribonucleotides (RNA), a combination thereof (e.g., RNA with a thymine base), biochemically or chemically modified nucleobases (e.g., one or more engineered modifications described herein), or combinations thereof.

[0073] As used herein, the term “sequence identity” refers to a relationship between two or more polynucleotide sequences or between two or more polypeptide sequences. In certain embodiments, for example, “sequence identity” or, for example, comprising a “sequence 50% identical to” may refer to the extent that sequences are identical on a nucleotide-by-nucleotide basis or an amino acid-by-amino acid basis over a window of comparison. A “comparison window” refers to a conceptual segment of at least 6 contiguous positions, usually about 50 to about 100, more usually about 100 to about 150 in which a sequence is compared to a reference sequence of the same number of contiguous positions after the two sequences are optimally aligned. Thus, a “percentage of sequence identity” may be calculated by comparing two optimally aligned sequences over the window of comparison, determining the number of positions at which the identical nucleic acid base (e.g., A, T, C, G, I) or the identical amino acid residue (e.g., Ala, Pro, Ser, Thr, Gly, Val, Leu, Ile, Phe, Tyr, Trp, Lys, Arg, His, Asp, Glu, Asn, Gln, Cys and Met) occurs in both sequences to yield the number of matched positions, dividing the number of matched positions by the total number of positions in the window of comparison (i.e., the window size), and multiplying the result by 100 to yield the percentage of sequence identity. When a position in one sequence is occupied by the same nucleic acid base or amino acid residue in the corresponding position of the comparator sequence, the sequences are said to be “identical” at that position. The percentage sequence identity is calculated by determining the number of positions at which the identical nucleic acid base or amino acid residue occurs in both sequences to yield the number of identical positions. The number of identical positions is then divided by the total number of positions in the comparison window and multiplied by 100 to yield the percentage of sequence identity. Percentage of sequence identity is determined by comparing two optimally aligned sequences over a comparison window. The comparison window for polynucleotide sequences can be, for instance, at least 20, 30, 40, 50, 60, 70, 80, 90, 100, 110, 120, 130, 140, 150, 160, 170, 180, 190, 200, 300, 400, 500, 600, 700, 800, 900 or 1000 or more nucleic acids in length. The comparison window for polypeptide sequences can be, for instance, at least 20, 30, 40, 50, 60, 70, 80, 90, 100, 110, 120, 130, 140, 150, 160, 170, 180, 190, 200, 300 or more amino acids in length. In order to optimally align sequences for comparison, the portion of a polynucleotide or polypeptide sequence in the comparison window can comprise additions or deletions termed gaps while the reference sequence is kept constant. Alignment for purposes of determining percent amino acid sequence identity can be achieved in various ways that are within the skill in the art, for instance, using publicly available computer software such as EMBOSS MATCHER, EMBOSS WATER, EMBOSS STRETCHER, EMBOSS NEEDEE, EMBOSS LALIGN, BLAST, BLAST-2, ALIGN, ALIGN-2, CLUSTAL OMEGA, or Megalign (DNASTAR) software. Those skilled in the art can determine appropriate parameters for measuring alignment, including any algorithms needed to achieve maximal alignment over the full length of the sequences being compared.

[0074] The terms, “% identical,” “% identity,” and “percent identity,” or grammatical equivalents thereof, refer to the extent to which two sequences (nucleotide or amino acid) have the same residue at the same positions in an alignment. For example, “an amino acid sequence is X % identical to SEQ ID NO: Y” can refer to % identity of the amino acid sequence to SEQ ID NO: Y and is elaborated as X % of residues in the amino acid sequence are identical to the residues of sequence disclosed in SEQ ID NO: Y. Generally, computer programs can be employed for such calculations. Illustrative programs that compare and align pairs of sequences, include ALIGN (Myers and Miller, Comput Appl Biosci. 1988 March; 4(1):11-7), FASTA (Pearson and Lipman, Proc Natl Acad Sci USA. 1988 April; 85(8):2444-8; Pearson, Methods Enzymol. 1990; 183:63-98) and gapped BLAST (Altschul et al., Nucleic Acids Res. 1997 Sep. 1; 25(17):3389-40), BLASTP, BLASTN, or GCG.

[0075] As used herein, the term “subject” refers to any subject, e.g., a human or a non-human mammal, for whom diagnosis, prognosis, or therapy is desired. The term “subject” may mean a human or non-human mammal affected, likely to be affected, or suspected to be affected with a disease. The terms “subject” and “patient” are used interchangeably herein. In some embodiments, a subject is a mammal. A mammal includes primates, such as humans, monkeys, chimpanzee, and apes, and non-primates such as domestic animals, including laboratory animals (such as rabbits and rodents, e.g., guinea pig, rat, or mouse) and household pets and farm animals (e.g., cats, dogs, swine, cattle, sheep, goats, horses, rabbits), and non-domestic animals, such as wildlife, birds, reptile, fish, or the like.

[0076] As used herein, the terms “nucleic acid”, “nucleic acid molecule”, or “polynucleotide” refer to deoxyribonucleotides or ribonucleotides and polymers thereof in either single- or double-stranded form. Unless specifically limited, the terms encompass nucleic acids containing analogues of natural nucleotides that have similar binding properties as the reference nucleic acid and are metabolized in a manner similar to naturally occurring nucleotides. Unless otherwise indicated, a particular nucleic acid sequence also implicitly encompasses conservatively modified variants thereof (e.g., degenerate codon substitutions) and complementary sequences as well as the sequence explicitly indicated. Specifically, degenerate codon substitutions can be achieved by generating sequences in which the third position of one or more selected (or all) codons is substituted with mixed-base and/or deoxyinosine residues (Batzer et al. (1991) Nucleic Acid Res. 19:5081; Ohtsuka et al. (1985) J. Biol. Chem. 260:2605-2608; Cassol et al. (1992); Rossolini et al. (1994) Mol. Cell. Probes 8:91-98). The term nucleic acid is used interchangeably with gene, cDNA, and mRNA encoded by a gene. As used herein, the terms “nucleic acid”, “nucleic acid molecule”, or “polynucleotide” are intended to include DNA molecules (e.g., cDNA or genomic DNA), RNA molecules (e.g., mRNA), analogs of the DNA or RNA generated using nucleotide analogs, and derivatives, fragments and homologs thereof.

[0077] The term “expression vector,” as used herein, refers to a nucleic acid molecule, linear or circular, comprising one or more expression units. In addition to one or more expression units, an expression vector can also include additional nucleic acid segments such as, for example, one or more origins of replication or one or more selectable markers. Expression vectors are generally derived from plasmid or viral DNA, or can contain elements of both.

[0078] As used herein, the term “transformation”, “transfection”, and “transduction” refer to the transfer of nucleic acid (i.e., a nucleotide polymer) into a cell.

[0079] The terms “amino-terminal” and “carboxyl-terminal” are used herein to denote positions within polypeptides. Where the context allows, these terms are used with reference to a particular sequence or portion of a polypeptide to denote proximity or relative position.

[0080] Throughout the present disclosure, the expression of an indicated protein by a cell or population of cells may include reference to various expression indicators such as “+” (e.g., CD200+), “−” (e.g., CD200−), “high” (e.g., CD200^{high}), and “low” (e.g., CD200^{low}). Herein, the various expression indicators refer to the presence or absence of the indicated protein (e.g., “+” or “−”, respectively) or the relative level of protein expression as measured by a convention protein expression assay (e.g., flow cytometry, fluorescence active cell sorting (FACS), or Western blot). Unless otherwise indicated, protein expression as described throughout the present application is determined by FACS.

[0081] A positive (+) indicator refers to a detectable level of expression of the indicated protein by FACS. A population of cells that is positive (+) for a particular protein may be further divided into populations of “low” and/or “high” subpopulations.

[0082] A subpopulation of “low” cells expresses the indicated protein but at a lower level than the other cells in the population (e.g., at least 60%, at least 70%, at least 80%, or at least 90% lower than the expression level of the other cells in the population) or at a lower level than expression in a control cell population.

[0083] A subpopulation of “high” cells expresses the indicated protein at a higher level than the other cells in the population (e.g., at least 40%, at least 50%, at least 60%, at least 70%, at least 80%, or at least 90% higher than the expression level of the other cells in the population) or at a higher level than expression in a control cell population.

[0084] A negative (−) indicator refers to an absence of expression of the indicated protein, or an expression level of the indicated protein that is below the limit of detection for the particular detection assay (e.g., below the limit of detection for a particular fluorescent antibody and/or flow cytometer).

### Overview

[0085] The human somatosensory system is comprised of diverse subtypes of sensory neurons, with each specialized in detecting specific modalities such as touch, pressure, temperature, vibration, pain, and body position. Among these, nociceptors detect potentially harmful stimuli, including noxious chemicals, thermal, and mechanical stimuli, through their heterogeneous expression of ion channels and receptors. In pathological states, however, persistent exposure to pro-inflammatory mediators, including cytokines such as TNF-α, PGE2, and IL-6 and neurotrophic factors like NGF, induces nociceptor hyperexcitability and upregulation of pro-nociceptive genes, which drive peripheral and central sensitization and result in chronic pain that is refractory to traditional mono-targeted analgesics.

[0086] Osteoarthritis (OA) exemplifies the convergence of inflammation and chronic pain. In early osteoarthritis, inflammatory cytokines drive osteoclast-mediated subchondral bone loss, while later stages are marked by abnormal osteoblast activity and development of subchondral sclerosis. This altered microenvironment creates a self-perpetuating axis that promotes aberrant nerve sprouting, amplifies pain, and sustains joint inflammation. Although the inflammatory nature of OA-associated pain is well recognized, current therapeutic strategies, including nonsteroidal anti-inflammatory drugs (NSAIDs), COX2 inhibitors, and anti-NGF antibodies, target singular pathways and fail to address the complex neuro-immune interactions that drive disease progression.

[0087] Efforts to model nociceptive signaling in chronic pain using heterologous expression systems or conventional human pluripotent stem cell-derived sensory neurons (hPSC-SNs) have faced some limitations. For example, heterologous systems lack the native neuronal machinery, while hPSC-SNs are highly heterogeneous, thus complicating the isolation and study of nociceptor subtypes. Provided herein are exemplary cell-based therapeutic strategies that leverage purified hPSC-derived nociceptive neurons (hPSC-NNs) as biological decoys to target the pathological neuro-immune axis in OA.

[0088] The intrinsic sensitivity of hPSC-NNs to inflammatory factors, which are conferred by their broad expression of most, if not all, receptors and ion channels of endogenous human nociceptors that cover known and unknown pain-relevant pathways, can be harnessed therapeutically. For instance, purified hPSC-NNs can be used to sequester inflammatory mediators and modulate the local joint microenvironment, thereby alleviating pain and reversing the underlying pathogenesis of OA.

[0089] Furthermore, it is estimated that over one-third of the world's population suffers from persistent or recurrent pain/itching caused by neurological disorders, diabetes, car accidents, war injuries, chemotherapy, etc. Most drugs on the market for pain sensation have undesired side effects because their targets exist both inside and outside the pain pathways, which makes the nociceptive and pruriceptive neurons as attractive targets for novel pharmacological strategies.

[0090] In addition to the urgent need for new painkillers without side effects, it is also important to develop a new humanized model system. To address this issue, some embodiments of the present disclosure provide a generation of human transient receptor potential cation channel subfamily V member 1 (TRPV1)+, Mas-related G protein-coupled receptor X1 (MRGPRX1)+ and sodium voltage-gated channel alpha subunit 9 (SCN9A)+ neurons from human pluripotent stem cells (hPSCs), followed by detailed functional characterization. When injected into host, these hPSCs can survive and rapidly generate extended axons.

[0091] Recent studies have revealed that nociceptive and pruriceptive neurons encompass a remarkably heterogeneous population that entails various transductions of noxious stimuli through numerous ion channels, membrane receptors, signaling molecules and neuropeptides and neurotransmitters, which hamper detailed understanding of human nociception as well as analgesic drug development. The transient receptor potential cation channel subfamily V member 1 (TRPV1) and sodium voltage-gated channel alpha subunit 9 (SCN9A, encoding Nav1.7) are promising targets of novel pain inhibitors, mainly because of their restricted expression in primary nociceptive neurons. However, the functional properties of human TRPV1 and SCN9A cannot be fully inferred from rodent analogs, owing to cross-species variations in their agonist activity and receptor function. While there have been innovations and advances in modelling and measuring pain in animals, it is also important to acquire TRPV1 and SCN9A expressing human nociceptive neurons.

[0092] Because persistent pain is often primed with peripheral pathological conditions, such as tissue inflammation and nerve injury, and its maintenance is also attributable to peripheral neuronal sensitization, development of pain-specific treatments would greatly benefit from the identification of novel targets specifically expressed in pain pathways, especially those targets on nociceptive primary sensory neurons. One potential target is the Mas-related G protein-coupled receptor (MRGPR). MRGPRs comprise a family of orphan G protein-coupled receptors (GPCRs) and include many genes in humans and rodents, but their physiological functions are only partially known. However, the functional properties of MRGPRX1 cannot be fully inferred from MRGPRC owing to cross-species variation in MRGPR agonist activity and receptor function. Although mouse MrgprC shares sequence homology with human MRGPRX1, it is becoming clear that human MRGPRX1 has binding and pharmacological profiles distinct from the binding and pharmacological profiles of rodent MRGPRC. For example, although the sequence of bovine adrenal medulla (BAM) peptide is conserved from rodents to human (e.g., BAM8-22 activates both MRGPRX1 and MRGPRC), most MRGPRX1-selective agonists have weak or no agonist activity at MRGPRC and do not affect rodent pain behavior. Again, such species difference is a long-lasting barrier for developing a new pain-killer drug. One can consider human dorsal root ganglia (DRG) tissue can be an alternative, however, it is difficult to isolate from donors at regular basis and the quantity of human DRG is also very low.

[0093] Human pluripotent stem cells (hPSCs), including human embryonic stem cells (hESCs) and human induced pluripotent stem cells (biPSCs), have emerged as a complementary system to animal models, because the directed specification of hESCs/hiPSCs is especially useful for generating certain cell types; they produce large quantities of otherwise extremely rare cell populations such as human nociceptive and pruriceptive neurons. Previous studies have shown that the sensory neuron population can be readily generated from hESCs/hiPSCs, however, the resulting sensory neurons are highly heterogeneous and the subtypes of sensory neurons were not sufficiently defined, purified yet or characterized in detail. Therefore, it is important to study the functions of human sensory neurons in genetically defined neuronal subsets. Provided here are methods of producing hPSC-derived TRPV1::GFP+, MRGPRX1::GFP+ and SCN9A::GFP+ sensory neurons. These methods can include functional characterization and in vivo transplantation studies.

[0094] The disclosure provided herein can help build a foundation to develop novel drug candidates as well as a potential cell therapy strategy for managing acute pain, chronic pain, and itch conditions.

### Pluripotent Stem Cells

[0095] Provided herein are populations of stem cells, pluripotent stems cells (PSCs) and pluripotent stem cell-derived sensory neurons (PSC-SNs) and human pluripotent stem cell-derived nociceptive neurons (PSC-NNs). In some embodiments, the populations of stem cells are isolated. In some embodiments, the isolated populations of cells comprise a biomarker or nociceptor marker. A biomarker or nociceptor marker of the isolated populations of cells can be determined via transcriptomic and functional profiling.

[0096] In some embodiments, the isolated population of stem cells comprises totipotent, pluripotent, multipotent, oligopotent, and unipotent stem cells. In some embodiments, the isolated population of stems cells comprises embryonic stem cells (ESCs), induced pluripotent stem cells (iPSCs), epiblast stem cells (EpiSCs), nuclear transfer embryonic stem cells (ntESCs), and embryonic germ cells (EGCs). In some embodiments, the isolated population can include one or more of nociceptors, mechanoreceptors, proprioceptors, thermoreceptors, and pruriceptors.

[0097] In some embodiments, the isolated population of pluripotent stem cells are derived from human tissue. In some embodiments, the isolated population of pluripotent stem cells are human pluripotent stem cells. In some embodiments, the isolated population of pluripotent stem cells are derived from non-human tissue. In some embodiments, the pluripotent stem cells are derived from tissue comprising bone marrow, adipose tissue, umbilical cord blood, placenta, amniotic fluid, dental pulp, peripheral blood, skin, muscle, embryos, or combination thereof. In some embodiments, the isolated population of pluripotent stem cells are allogenic pluripotent stem cells. In some embodiments, the isolated population of pluripotent stem cells are autologous pluripotent stem cells.

[0098] In some embodiments, the isolated population of cells comprise a nociceptor marker. In some embodiments, the population of cells has a high expression of the nociceptor marker. In some embodiments, at least 40%, at least 45%, at least 50%, at least 55%, at least 60%, at least 65%, at least 70%, at least 75%, at least 80%, at least 85%, at least 90%, at least 95%, at least 99% or 100% of the isolated population of cells have high expression of the nociceptor marker. In some embodiments, the isolated population of cells comprise a biomarker. In some embodiments, the population of cells has a high expression of the biomarker. In some embodiments, at least 40%, at least 45%, at least 50%, at least 55%, at least 60%, at least 65%, at least 70%, at least 75%, at least 80%, at least 85%, at least 90%, at least 95%, at least 99% or 100% of the isolated population of cells have high expression of the biomarker.

[0099] In some embodiments, the isolated population of cells comprise CD200 as a nociceptor marker. In some embodiments, the population of cells has a high expression of CD200 (e.g., referred CD200^{high} PSC-NNs). In some embodiments, at least 40%, at least 45%, at least 50%, at least 55%, at least 60%, at least 65%, at least 70%, at least 75%, at least 80%, at least 85%, at least 90%, at least 95%, at least 99% or 100% of the isolated population of cells are CD200^{high} In some embodiments, the population of PSC-NNs has a high expression of CD200. The CD200^{high} PSC-NNs can act as biological decoys by sequestering inflammatory ligands while secreting reparative factors in human and mouse joint tissues.

[0100] In some embodiments, the cells express TRPV1, SCN9A, MRGPRX1, or KCNQ2. In some embodiments, the isolated population of cells express TRPV1, SCN9A, and MRGPRX1. In some embodiments, the isolated population of cells further express TRPV1 and SCN9A nociceptors. In some embodiments, the isolated population of cells are enriched in TRPV1+ and SCN9A+ nociceptors.

[0101] An exemplary method of isolating PSC-NNs is described below. First, reporter lines expressing fluorescent tags can be generated under the control of TRPV1, SCN9A, and MRGPRX1 loci. While these reporter lines can be indispensable for in-depth transcriptomic, morphological, and functional characterization, their translational utility may be limited by concerns over the immunogenicity and cytotoxicity of fluorescent proteins. To address this, CD200 can be identified as a nociceptor-specific surface marker enriched in TRPV1+ and SCN9A+ nociceptors. CD200 can enable purification of nociceptors from heterogeneous PSC-SN populations without the need for genetic labeling. In an exemplary application, CD200^{high} hPSC-NNs can exhibit strong responses to inflammatory mediators present in synovial fluid from osteoarthritis patients and were transcriptionally enriched for nociceptive ion channels, receptors, and pathways essential for known and unknown nociceptive signaling. Additionally, NGF, a neurotrophic factor commonly used to direct sensory neuron lineage commitment, can sensitize hPSC-NNs in vitro by activating TrkA and promoting long-term expression of pronociceptive genes such as those for TRPV1, Nav1.8, and substance P 40. Therefore, the intrinsic responsiveness of hPSC-NNs to inflammatory ligands can be leveraged to sequester them within the osteoarthritis joints (e.g., knee joints).

[0102] Another exemplary application of the isolated population of cells is below. The isolated population of CD200^{high} cells can be injected into the joint of a subject and can serve as scavengers of pro-inflammatory mediators. These cells can alleviate joint pain (e.g., osteroarthritis) and modulate the endogenous neuro-immune interface by reducing aberrant nerve growth and suppressing pro-inflammatory signaling. CD200^{high} cells (e.g., CD200^{high} PSC-NNs) can be used as a therapeutic modality capable of intercepting inflammatory cues and modulating joint pathophysiology at multiple levels.

### Modified Pluripotent Stem Cells

[0103] In some embodiments, the present disclosure provides modified stem cells or pluripotent stem cells. Herein, the term “modified pluripotent stem cells” encompasses pluripotent stem cells comprising one or more genomic modifications resulting in the reduced expression and/or function of one or more endogenous target genes as well as pluripotent stem cells comprising a gene-regulating system capable of reducing the expression and/or function of one or more endogenous target genes. Herein, an “un-modified pluripotent stem cell” or “control pluripotent stem cell” refers to a cell or population of cells wherein the genomes have not been modified and that does not comprise a gene-regulating system or comprises a control gene-regulating system (e.g., an empty vector control, a non-targeting gRNA, a scrambled siRNA, etc.).

[0104] The term “pluripotent stem cell” includes but is not limited to embryonic stem cells (ESCs), induced pluripotent stem cells (iPSCs), epiblast stem cells (EpiSCs), nuclear transfer embryonic stem cells (ntESCs), and embryonic germ cells (EGCs). In some embodiments, the pluripotent stem cells are allogenic or autologous.

[0105] In some embodiments, the pluripotent stem cell is an animal cell or is derived from an animal cell, including from an invertebrate animal or a vertebrate animals (e.g., fish, amphibian, reptile, bird, or mammal). In some embodiments, the pluripotent stem cell is a mammalian cell or is derived from a mammalian cell (e.g., a pig, a cow, a goat, a sheep, a rodent, a non-human primate, a human, etc.). In some embodiments, the pluripotent stem cell is a rodent cell or is derived from a rodent cell (e.g., a rat or a mouse). In some embodiments, the modified pluripotent stem cell is a human cell or is derived from a human cell.

[0106] In some embodiments, the modified pluripotent stem cells comprise one or more modifications (e.g., insertions, deletions, or mutations of one or more nucleic acids) in the genomic DNA sequence of an endogenous target gene resulting in the reduced expression and/or function the endogenous gene. Such modifications are referred to herein as “inactivating mutations” and endogenous genes comprising an inactivating mutation are referred to as “modified endogenous target genes.” In some embodiments, the inactivating mutations reduce or inhibit mRNA transcription, thereby reducing the expression level of the encoded mRNA transcript and protein. In some embodiments, the inactivating mutations reduce or inhibit mRNA translation, thereby reducing the expression level of the encoded protein. In some embodiments, the inactivating mutations encode a modified endogenous protein with reduced or altered function compared to the unmodified (i.e., wild-type) version of the endogenous protein (e.g., a dominant-negative mutant, described infra).

[0107] In some embodiments, the modified pluripotent stem cells comprise one or more genomic modifications at a genomic location other than an endogenous target gene that result in the reduced expression and/or function of the endogenous target gene or that result in the expression of a modified version of an endogenous protein. For example, in some embodiments, a polynucleotide sequence encoding a gene regulating system is inserted into one or more locations in the genome, thereby reducing the expression and/or function of an endogenous target gene upon the expression of the gene-regulating system. In some embodiments, a polynucleotide sequence encoding a modified version of an endogenous protein is inserted at one or more locations in the genome, wherein the function of the modified version of the protein is reduced compared to the un-modified or wild-type version of the protein (e.g., a dominant-negative mutant, described infra).

[0108] In some embodiments, the modified pluripotent stem cells described herein comprises one or more modified endogenous target genes, wherein the one or more modifications result in a reduced expression and/or function of a gene product (i.e., an mRNA transcript or a protein) encoded by the endogenous target gene compared to an unmodified pluripotent stem cell. For example, in some embodiments, a modified pluripotent stem cell demonstrates reduced expression of an mRNA transcript and/or reduced expression of a protein. In some embodiments, the expression of the gene product in a modified pluripotent stem cell is reduced by at least 5% compared to the expression of the gene product in an unmodified pluripotent stem cell. In some embodiments, the expression of the gene product in a modified pluripotent stem cell is reduced by at least 10%, 20%, 30%, 40%, 50%, 60%, 70%, 80%, 90%, or more compared to the expression of the gene product in an unmodified pluripotent stem cell. In some embodiments, the modified pluripotent stem cells described herein demonstrate reduced expression and/or function of gene products encoded by a plurality (e.g., two or more) of endogenous target genes compared to the expression of the gene products in an unmodified pluripotent stem cell. For example, in some embodiments, a modified pluripotent stem cell demonstrates reduced expression and/or function of gene products from 2, 3, 4, 5, 6, 7, 8, 9, 10, or more endogenous target genes compared to the expression of the gene products in an unmodified pluripotent stem cell.

[0109] In some embodiments, the present disclosure provides a modified pluripotent stem cell wherein one or more endogenous target genes, or a portion thereof, are deleted (i.e., “knocked-out”) such that the modified pluripotent stem cell does not express the mRNA transcript or protein. In some embodiments, a modified pluripotent stem cell comprises deletion of a plurality of endogenous target genes, or portions thereof. In some embodiments, a modified pluripotent stem cell comprises deletion of 2, 3, 4, 5, 6, 7, 8, 9, 10, or more endogenous target genes.

[0110] In some embodiments, the modified pluripotent stem cells described herein comprise one or more modified endogenous target genes, wherein the one or more modifications to the target DNA sequence result in expression of a protein with reduced or altered function (e.g., a “modified endogenous protein”) compared to the function of the corresponding protein expressed in an unmodified pluripotent stem cell (e.g., a “unmodified endogenous protein”). In some embodiments, the modified pluripotent stem cells described herein comprise 2, 3, 4, 5, 6, 7, 8, 9, 10, or more modified endogenous target genes encoding 2, 3, 4, 5, 6, 7, 8, 9, 10, or more modified endogenous proteins. In some embodiments, the modified endogenous protein demonstrates reduced or altered binding affinity for another protein expressed by the modified pluripotent stem cell or expressed by another cell; reduced or altered signaling capacity; reduced or altered enzymatic activity; reduced or altered DNA-binding activity; or reduced or altered ability to function as a scaffolding protein.

[0111] In some embodiments, the modified endogenous target gene comprises one or more dominant negative mutations. As used herein, a “dominant-negative mutation” refers to a substitution, deletion, or insertion of one or more nucleotides of a target gene such that the encoded protein acts antagonistically to the protein encoded by the unmodified target gene. The mutation is dominant-negative because the negative phenotype confers genic dominance over the positive phenotype of the corresponding unmodified gene. A gene comprising one or more dominant-negative mutations and the protein encoded thereby are referred to as a “dominant-negative mutants”, e.g. dominant-negative genes and dominant-negative proteins. In some embodiments, the dominant negative mutant protein is encoded by an exogenous transgene inserted at one or more locations in the genome of the pluripotent stem cell.

[0112] Various mechanisms for dominant negativity are known. Typically, the gene product of a dominant negative mutant retains some functions of the unmodified gene product but lacks one or more crucial other functions of the unmodified gene product. This causes the dominant-negative mutant to antagonize the unmodified gene product. For example, as an illustrative embodiment, a dominant-negative mutant of a transcription factor may lack a functional activation domain but retain a functional DNA binding domain. In this example, the dominant-negative transcription factor cannot activate transcription of the DNA as the unmodified transcription factor does, but the dominant-negative transcription factor can indirectly inhibit gene expression by preventing the unmodified transcription factor from binding to the transcription-factor binding site. As another illustrative embodiment, dominant-negative mutations of proteins that function as dimers are known. Dominant-negative mutants of such dimeric proteins may retain the ability to dimerize with unmodified protein but be unable to function otherwise. The dominant-negative monomers, by dimerizing with unmodified monomers to form heterodimers, prevent formation of functional homodimers of the unmodified monomers.

[0113] In some embodiments, the modified pluripotent stem cells comprise a gene-regulating system capable of reducing the expression or function of one or more endogenous target genes. The gene-regulating system can reduce the expression and/or function of the endogenous target genes modifications by a variety of mechanisms including by modifying the genomic DNA sequence of the endogenous target gene (e.g., by insertion, deletion, or mutation of one or more nucleic acids in the genomic DNA sequence); by regulating transcription of the endogenous target gene (e.g., inhibition or repression of mRNA transcription); and/or by regulating translation of the endogenous target gene (e.g., by mRNA degradation).

[0114] In some embodiments, the modified pluripotent stem cells described herein comprise a gene-regulating system (e.g., a nucleic acid-based gene-regulating system, a protein-based gene-regulating system, or a combination protein/nucleic acid-based gene-regulating system). In such embodiments, the gene-regulating system comprised in the modified pluripotent stem cell is capable of modifying one or more endogenous target genes. In some embodiments, the modified pluripotent stem cells described herein comprise a gene-regulating system comprising: one or more nucleic acid molecules capable of reducing the expression or modifying the function of a gene product encoded by one or more endogenous target genes; one or more polynucleotides encoding a nucleic acid molecule that is capable of reducing the expression or modifying the function of a gene product encoded by one or more endogenous target genes; one or more proteins capable of reducing the expression or modifying the function of a gene product encoded by one or more endogenous target genes; one or more polynucleotides encoding a protein that is capable of reducing the expression or modifying the function of a gene product encoded by one or more endogenous target genes; one or more guide RNAs (gRNAs) capable of binding to a target DNA sequence in an endogenous gene; one or more polynucleotides encoding one or more gRNAs capable of binding to a target DNA sequence in an endogenous gene; one or more site-directed modifying polypeptides capable of interacting with a gRNA and modifying a target DNA sequence in an endogenous gene; one or more polynucleotides encoding a site-directed modifying polypeptide capable of interacting with a gRNA and modifying a target DNA sequence in an endogenous gene; one or more guide DNAs (gDNAs) capable of binding to a target DNA sequence in an endogenous gene; one or more polynucleotides encoding one or more gDNAs capable of binding to a target DNA sequence in an endogenous gene; one or more site-directed modifying polypeptides capable of interacting with a gDNA and modifying a target DNA sequence in an endogenous gene; one or more polynucleotides encoding a site-directed modifying polypeptide capable of interacting with a gDNA and modifying a target DNA sequence in an endogenous gene; one or more gRNAs capable of binding to a target mRNA sequence encoded by an endogenous gene; one or more polynucleotides encoding one or more gRNAs capable of binding to a target mRNA sequence encoded by an endogenous gene; one or more site-directed modifying polypeptides capable of interacting with a gRNA and modifying a target mRNA sequence encoded by an endogenous gene; one or more polynucleotides encoding a site-directed modifying polypeptide capable of interacting with a gRNA and modifying a target mRNA sequence encoded by an endogenous gene; or any combination of the above.

[0115] In some embodiments, one or more polynucleotides encoding the gene-regulating system are inserted into the genome of the pluripotent stem cell. In some embodiments, one or more polynucleotides encoding the gene-regulating system are expressed episomaly and are not inserted into the genome of the pluripotent stem cell.

[0116] In some embodiments, the modified pluripotent stem cells described herein comprise reduced expression and/or function of one or more endogenous target genes and further comprise one or more exogenous transgenes inserted at one or more genomic loci (e.g., a genetic “knock-in”). In some embodiments, the one or more exogenous transgenes encode detectable tags, safety-switch systems, chimeric switch receptors, and/or engineered antigen-specific receptors.

[0117] In some embodiments, the modified pluripotent stem cells described herein further comprise an exogenous transgene encoding a detectable tag. Examples of detectable tags include but are not limited to, FLAG tags, poly-histidine tags (e.g. 6×His), SNAP tags, Halo tags, cMyc tags, glutathione-S-transferase tags, avidin, enzymes, fluorescent proteins, luminescent proteins, chemiluminescent proteins, bioluminescent proteins, and phosphorescent proteins. In some embodiments the fluorescent protein is selected from the group consisting of blue/UV proteins (such as BFP, TagBFP, mTagBFP2, Azurite, EBFP2, mKalama1, Sirius, Sapphire, and T-Sapphire); cyan proteins (such as CFP, eCFP, Cerulean, SCFP3A, mTurquoise, mTurquoise2, monomeric Midoriishi-Cyan, TagCFP, and mTFP1); green proteins (such as: GFP, eGFP, meGFP (A208K mutation), Emerald, Superfolder GFP, Monomeric Azami Green, TagGFP2, mUKG, mWasabi, Clover, and mNeonGreen); yellow proteins (such as YFP, eYFP, Citrine, Venus, SYFP2, and TagYFP); orange proteins (such as Monomeric Kusabira-Orange, mKOx, mKO2, mOrange, and mOrange2); red proteins (such as RFP, mRaspberry, mCherry, mStrawberry, mTangerine, tdTomato, TagRFP, TagRFP-T, mApple, mRuby, and mRuby2); far-red proteins (such as mPlum, HcRed-Tandem, mKate2, mNeptune, and NirFP); near-infrared proteins (such as TagRFP657, IFP1.4, and iRFP); long stokes shift proteins (such as mKeima Red, LSS-mKate1, LSS-mKate2, and mBeRFP); photoactivatible proteins (such as PA-GFP, PAmCherry1, and PATagRFP); photoconvertible proteins (such as Kaede (green), Kaede (red), KikGR1 (green), KikGR1 (red), PS-CFP2, PS-CFP2, mEos2 (green), mEos2 (red), mEos3.2 (green), mEos3.2 (red), PSmOrange, and PSmOrange); and photoswitchable proteins (such as Dronpa). In some embodiments, the detectable tag can be selected from AmCyan, AsRed, DsRed2, DsRed Express, E2-Crimson, HcRed, ZsGreen, ZsYellow, mCherry, mStrawberry, mOrange, mBanana, mPlum, mRasberry, tdTomato, DsRed Monomer, and/or AcGFP, all of which are available from Clontech.

[0118] In some embodiments, the modified pluripotent stem cells described herein further comprise an exogenous transgene encoding a safety-switch system. Safety-switch systems (also referred to in the art as suicide gene systems) comprise exogenous transgenes encoding for one or more proteins that enable the elimination of a modified pluripotent stem cell after the cell has been administered to a subject. Examples of safety-switch systems are known in the art. For example, safety-switch systems include genes encoding for proteins that convert non-toxic pro-drugs into toxic compounds such as the Herpes simplex thymidine kinase (Hsv-tk) and ganciclovir (GCV) system (Hsv-tk/GCV). Hsv-tk converts non-toxic GCV into a cytotoxic compound that leads to cellular apoptosis. As such, administration of GCV to a subject that has been treated with modified pluripotent stem cells comprising a transgene encoding the Hsv-tk protein can selectively eliminate the modified pluripotent stem cells while sparing endogenous pluripotent stem cells. (See e.g., Bonini et al., Science, 1997, 276(5319):1719-1724; Ciceri et al., Blood, 2007, 109(11):1828-1836; Bondanza et al., Blood 2006, 107(5):1828-1836).

[0119] Additional safety-switch systems include genes encoding for cell-surface markers, enabling elimination of modified pluripotent stem cells by administration of a monoclonal antibody specific for the cell-surface marker via ADCC. In some embodiments, the modified pluripotent stem cells described herein further comprise an exogenous transgene encoding a chimeric switch receptor. Chimeric switch receptors are engineered cell-surface receptors comprising an extracellular domain from an endogenous cell-surface receptor and a heterologous intracellular signaling domain, such that ligand recognition by the extracellular domain results in activation of a different signaling cascade than that activated by the wild type form of the cell-surface receptor. In some embodiments, the chimeric switch receptor comprises the extracellular domain of an inhibitory cell-surface receptor fused to an intracellular domain that leads to the transmission of an activating signal rather than the inhibitory signal normally transduced by the inhibitory cell-surface receptor. In particular embodiments, extracellular domains derived from cell-surface receptors known to inhibit pluripotent stem cell activation can be fused to activating intracellular domains. Engagement of the corresponding ligand will then activate signaling cascades that increase, rather than inhibit, the activation of the pluripotent stem cell.

### Gene-Regulating Systems

[0120] Herein, the term “gene-regulating system” refers to a protein, nucleic acid, or combination thereof that is capable of modifying an endogenous target DNA sequence when introduced into a cell, thereby regulating the expression or function of the encoded gene product. Numerous gene editing systems suitable for use in the methods of the present disclosure are known in the art including, but not limited to, shRNAs, siRNAs, zinc-finger nuclease systems, TALEN systems, and CRISPR/Cas systems.

[0121] As used herein, “regulate,” when used in reference to the effect of a gene-regulating system on an endogenous target gene encompasses any change in the sequence of the endogenous target gene, any change in the epigenetic state of the endogenous target gene, and/or any change in the expression or function of the protein encoded by the endogenous target gene.

[0122] In some embodiments, the gene-regulating system may mediate a change in the sequence of the endogenous target gene, for example, by introducing one or more mutations into the endogenous target sequence, such as by insertion or deletion of one or more nucleic acids in the endogenous target sequence. Exemplary mechanisms that can mediate alterations of the endogenous target sequence include, but are not limited to, non-homologous end joining (NHEJ) (e.g., classical or alternative), microhomology-mediated end joining (NMMEJ), homology-directed repair (e.g., endogenous donor template mediated), SDSA (synthesis dependent strand annealing), single strand annealing or single strand invasion.

[0123] In some embodiments, the gene-regulating system may mediate a change in the epigenetic state of the endogenous target sequence. For example, in some embodiments, the gene-regulating system may mediate covalent modifications of the endogenous target gene DNA (e.g., cytosine methylation and hydroxymethylation) or of associated histone proteins (e.g. lysine acetylation, lysine and arginine methylation, serine and threonine phosphorylation, and lysine ubiquitination and sumoylation).

[0124] In some embodiments, the gene-regulating system may mediate a change in the expression of the protein encoded by the endogenous target gene. In such embodiments, the gene-regulating system may regulate the expression of the encoded protein by modifications of the endogenous target DNA sequence, or by acting on the mRNA product encoded by the DNA sequence. In some embodiments, the gene-regulating system may result in the expression of a modified endogenous protein. In such embodiments, the modifications to the endogenous DNA sequence mediated by the gene-regulating system result in the expression of an endogenous protein demonstrating a reduced function as compared to the corresponding endogenous protein in an unmodified pluripotent stem cell. In such embodiments, the expression level of the modified endogenous protein may be increased, decreased or may be the same, or substantially similar to, the expression level of the corresponding endogenous protein in an unmodified pluripotent stem cell.

### Combination of Nucleic Acid/Protein-Based Gene-Regulating Systems

[0125] Combination gene-regulating systems comprise a site-directed modifying polypeptide and a nucleic acid guide molecule. Herein, a “site-directed modifying polypeptide” refers to a polypeptide that binds to a nucleic acid guide molecule, is targeted to a target nucleic acid sequence, (for example, an endogenous target DNA or RNA sequence) by the nucleic acid guide molecule to which it is bound, and modifies the target nucleic acid sequence (e.g., by cleavage, mutation, or methylation of the target nucleic acid sequence).

[0126] A site-directed modifying polypeptide comprises two portions, a portion that binds the nucleic acid guide and an activity portion. In some embodiments, a site-directed modifying polypeptide comprises an activity portion that exhibits site-directed enzymatic activity (e.g., DNA methylation, DNA or RNA cleavage, histone acetylation, histone methylation, etc.), wherein the site of enzymatic activity is determined by the guide nucleic acid. In some cases, a site-directed modifying polypeptide comprises an activity portion that has enzymatic activity that modifies the endogenous target nucleic acid sequence (e.g., nuclease activity, methyltransferase activity, demethylase activity, DNA repair activity, DNA damage activity, deamination activity, dismutase activity, alkylation activity, depurination activity, oxidation activity, pyrimidine dimer forming activity, integrase activity, transposase activity, recombinase activity, polymerase activity, ligase activity, helicase activity, photolyase activity or glycosylase activity). In other cases, a site-directed modifying polypeptide comprises an activity portion that has enzymatic activity that modifies a polypeptide (e.g., a histone) associated with the endogenous target nucleic acid sequence (e.g., methyltransferase activity, demethylase activity, acetyltransferase activity, deacetylase activity, kinase activity, phosphatase activity, ubiquitin ligase activity, deubiquitinating activity, adenylation activity, deadenylation activity, SUMOylating activity, deSUMOylating activity, ribosylation activity, deribosylation activity, myristoylation activity or demyristoylation activity). In some embodiments, a site-directed modifying polypeptide comprises an activity portion that modulates transcription of a target DNA sequence (e.g., to increase or decrease transcription). In some embodiments, a site-directed modifying polypeptide comprises an activity portion that modulates expression or translation of a target RNA sequence (e.g., to increase or decrease transcription).

[0127] The nucleic acid guide comprises two portions: a first portion that is complementary to, and capable of binding with, an endogenous target nucleic sequence (referred to herein as a “nucleic acid-binding segment”), and a second portion that is capable of interacting with the site-directed modifying polypeptide (referred to herein as a “protein-binding segment”). In some embodiments, the nucleic acid-binding segment and protein-binding segment of a nucleic acid guide are comprised within a single polynucleotide molecule. In some embodiments, the nucleic acid-binding segment and protein-binding segment of a nucleic acid guide are each comprised within separate polynucleotide molecules, such that the nucleic acid guide comprises two polynucleotide molecules that associate with each other to form the functional guide.

[0128] The nucleic acid guide mediates the target specificity of the combined protein/nucleic acid gene-regulating systems by specifically hybridizing with a target nucleic acid sequence. In some embodiments, the target nucleic acid sequence is an RNA sequence, such as an RNA sequence comprised within an mRNA transcript of a target gene. In some embodiments, the target nucleic acid sequence is a DNA sequence comprised within the DNA sequence of a target gene. Reference herein to a target gene encompasses the full-length DNA sequence for that particular gene which comprises a plurality of target genetic loci (i.e., portions of a particular target gene sequence (e.g., an exon or an intron)). Within each target genetic loci are shorter stretches of DNA sequences referred to herein as “target DNA sequences” that can be modified by the gene-regulating systems described herein. Further, each target genetic loci comprises a “target modification site,” which refers to the precise location of the modification induced by the gene-regulating system (e.g., the location of an insertion, a deletion, or mutation, the location of a DNA break, or the location of an epigenetic modification).

[0129] The gene-regulating systems described herein may comprise a single nucleic acid guide, or may comprise a plurality of nucleic acid guides (e.g., 2, 3, 4, 5, 6, 7, 8, 9, 10, or more nucleic acid guides).

[0130] In some embodiments, the combined protein/nucleic acid gene-regulating systems comprise site-directed modifying polypeptides derived from Argonaute (Ago) proteins (e.g., T. thermophiles Ago or TtAgo). In such embodiments, the site-directed modifying polypeptide is a T. thermophiles Ago DNA endonuclease and the nucleic acid guide is a guide DNA (gDNA) (See, Swarts et al., Nature 507 (2014), 258-261). In some embodiments, the present disclosure provides a polynucleotide encoding a gDNA. In some embodiments, a gDNA-encoding nucleic acid is comprised in an expression vector, e.g., a recombinant expression vector. In some embodiments, the present disclosure provides a polynucleotide encoding a TtAgo site-directed modifying polypeptide or variant thereof. In some embodiments, the polynucleotide encoding a TtAgo site-directed modifying polypeptide is comprised in an expression vector, e.g., a recombinant expression vector.

[0131] In some embodiments, the gene editing systems described herein are CRISPR (Clustered Regularly Interspaced Short Palindromic Repeats)/Cas (CRISPR Associated) nuclease systems. In some embodiments, the CRISPR/Cas system is a Class 2 system. Class 2 CRISPR/Cas systems are divided into three types: Type II, Type V, and Type VI systems. In some embodiments, the CRISPR/Cas system is a Class 2 Type II system, utilizing the Cas9 protein. In such embodiments, the site-directed modifying polypeptide is a Cas9 DNA endonuclease (or variant thereof) and the nucleic acid guide molecule is a guide RNA (gRNA). In some embodiments, the CRISPR/Cas system is a Class 2 Type V system, utilizing the Cas12 proteins (e.g., Cas12a (also known as Cpf1), Cas12b (also known as C2c1), Cas12c (also known as C2c3), Cas12d (also known as CasY), and Cas12e (also known as CasX)). In such embodiments, the site-directed modifying polypeptide is a Cas12 DNA endonuclease (or variant thereof) and the nucleic acid guide molecule is a gRNA. In some embodiments, the CRISPR/Cas system is a Class 2 and Type VI system, utilizing the Cas13 proteins (e.g., Cas13a (also known as C2c2), Cas13b, and Cas13c). (See, Pyzocha et al., ACS Chemical Biology, 13(2), 347-356). In such embodiments, the site-directed modifying polypeptide is a Cas13 RNA riboendonuclease and the nucleic acid guide molecule is a gRNA.

[0132] A Cas polypeptide refers to a polypeptide that can interact with a gRNA molecule and, in concert with the gRNA molecule, home or localize to a target DNA or target RNA sequence. Cas polypeptides include naturally occurring Cas proteins and engineered, altered, or otherwise modified Cas proteins that differ by one or more amino acid residues from a naturally-occurring Cas sequence.

[0133] A guide RNA (gRNA) comprises two segments, a DNA-binding segment and a protein-binding segment. In some embodiments, the protein-binding segment of a gRNA is comprised in one RNA molecule and the DNA-binding segment is comprised in another separate RNA molecule. Such embodiments are referred to herein as “double-molecule gRNAs” or “two-molecule gRNA” or “dual gRNAs.” In some embodiments, the gRNA is a single RNA molecule and is referred to herein as a “single-guide RNA” or an “sgRNA.” The term “guide RNA” or “gRNA” is inclusive, referring both to two-molecule guide RNAs and sgRNAs.

[0134] The protein-binding segment of a gRNA comprises, in part, two complementary stretches of nucleotides that hybridize to one another to form a double stranded RNA duplex (dsRNA duplex), which facilitates binding to the Cas protein. The nucleic acid-binding segment (or “nucleic acid-binding sequence”) of a gRNA comprises a nucleotide sequence that is complementary to and capable of binding to a specific target nucleic acid sequence. The protein-binding segment of the gRNA interacts with a Cas polypeptide and the interaction of the gRNA molecule and site-directed modifying polypeptide results in Cas binding to the endogenous nucleic acid sequence and produces one or more modifications within or around the target nucleic acid sequence. The precise location of the target modification site is determined by both (i) base-pairing complementarity between the gRNA and the target nucleic acid sequence; and (ii) the location of a short motif, referred to as the protospacer adjacent motif (PAM), in the target DNA sequence (referred to as a protospacer flanking sequence (PFS) in target RNA sequences). The PAM/PFS sequence is required for Cas binding to the target nucleic acid sequence. A variety of PAM/PFS sequences are known in the art and are suitable for use with a particular Cas endonuclease (e.g., a Cas9 endonuclease)(See e.g., Nat Methods. 2013 November; 10(11): 1116-1121 and Sci Rep. 2014; 4: 5405). In some embodiments, the PAM sequence is located within 50 base pairs of the target modification site in a target DNA sequence. In some embodiments, the PAM sequence is located within 10 base pairs of the target modification site in a target DNA sequence. The DNA sequences that can be targeted by this method are limited only by the relative distance of the PAM sequence to the target modification site and the presence of a unique 20 base pair sequence to mediate sequence-specific, gRNA-mediated Cas binding. In some embodiments, the PFS sequence is located at the 3′ end of the target RNA sequence. In some embodiments, the target modification site is located at the 5′ terminus of the target locus. In some embodiments, the target modification site is located at the 3′ end of the target locus. In some embodiments, the target modification site is located within an intron or an exon of the target locus.

[0135] In some embodiments, the PAM sequence comprises a nucleic acid sequence having at least 90% or 95% identity to any one of the sequences in Tables 1 or 2. In some embodiments, the PAM sequence comprises a nucleic acid sequence identical to any one of the sequences in Tables 1 or 2.

[0136] In some embodiments, the present disclosure provides a polynucleotide encoding a gRNA. In some embodiments, a gRNA-encoding nucleic acid is comprised in an expression vector, e.g., a recombinant expression vector. In some embodiments, the present disclosure provides a polynucleotide encoding a site-directed modifying polypeptide. In some embodiments, the polynucleotide encoding a site-directed modifying polypeptide is comprised in an expression vector, e.g., a recombinant expression vector.

### 1. Cas Proteins

[0137] In some embodiments, the site-directed modifying polypeptide is a Cas protein. Cas molecules of a variety of species can be used in the methods and compositions described herein, including Cas molecules derived from S. pyogenes, S. aureus, N. meningitidis, S. thermophiles, Acidovorax avenae, Actinobacillus pleuropneumoniae, Actinobacillus succinogenes, Actinobacillus suis, Actinomyces sp., Cycliphilus denitrificans, Aminomonas paucivorans, Bacillus cereus, Bacillus smithii, Bacillus thuringiensis, Bacteroides sp., Blastopirellula marina, Bradyrhizobium sp., Brevibacillus laterospoxus, Campylobacter coli, Campylobacter jejuni, Campylobacter lari, Candidatus puniceispirillum, Clostridium cellulolyticum, Clostridium perfringens, Corynebacterium accolens, Corynebacterium diphtheria, Corynebacterium matruchotii, Dinoroseobacter shibae, Eubacterium dolichum, Gamma proteobacterium, Gluconacetobacter diazotrophicus, Haemophilus parainfluenzae, Haemophilus sputomm, Helicobacter canadensis, Helicobacter cinaedi, Helicobacter mustelae, Ilyobacter polytropus, Kingella kingae, Lactobacillus crispatus, Listeria ivanovii, Listeria monocytogenes, Listeriaceae bacterium, Methylocystis sp., Methylosinus trichosporium, Mobiluncus mulieris, Neisseria bacilliformis, Neisseria cinerea, Neisseria flavescens, Neisseria lactamica, Neisseria meningitidis, Neisseria sp., Neisseria wadsworthii, Nitrosomonas sp., Parvibaculum lavamentivorans, Pasteurella multocida, Phascolarctobacterium succinatutens, Ralstonia syzygii, Rhodopseudomonas palustris, Rhodovulum sp., Simonsiella muelleri, Sphingomonas sp., Sporolactobacillus vineae, Staphylococcus aureus, Staphylococcus lugdunensis, Streptococcus sp., Subdoligranulum sp., Tistrella mobilis, Treponema sp., or Verminephrobacter eiseniae.

[0138] In some embodiments, the Cas protein is a naturally-occurring Cas protein. In some embodiments, the Cas endonuclease is selected from the group consisting of C2C1, C2C3, Cpf1 (also referred to as Cas12a), Cas12b, Cas12c, Cas12d, Cas12e, Cas13a, Cas13b, Cas13c, Cas13d, Cas1, CaslB, Cas2, Cas3, Cas4, Cas5, Cas6, Cas7, Cas8, Cas9 (also known as Csn1 and Csx12), Cas10, Csy1, Csy2, Csy3, Cse1, Cse2, Csc1, Csc2, Csa5, Csn2, Csm2, Csm3, Csm4, Csm5, Csm6, Cmr1, Cmr3, Cmr4, Cmr5, Cmr6, Csb1, Csb2, Csb3, Csx17, Csx14, Csx10, Csx16, CsaX, Csx3, Csx1, Csx15, Csf1, Csf2, Csf3, and Csf4.

[0139] In some embodiments, the Cas protein is an endoribonuclease such as a Cas13 protein. In some embodiments, the Cas13 protein is a Cas13a (Abudayyeh et al., Nature 550 (2017), 280-284), Cas13b (Cox et al., Science (2017) 358:6336, 1019-1027), Cas13c (Cox et al., Science (2017) 358:6336, 1019-1027), or Cas13d (Zhang et al., Cell 175 (2018), 212-223) protein.

[0140] In some embodiments, the Cas protein is a wild-type or naturally occurring Cas9 protein or a Cas9 ortholog. Wild-type Cas9 is a multi-domain enzyme that uses an HNH nuclease domain to cleave the target strand of DNA and a RuvC-like domain to cleave the non-target strand. Binding of WT Cas9 to DNA based on gRNA specificity results in double-stranded DNA breaks that can be repaired by non-homologous end joining (NHEJ) or homology-directed repair (HDR). Exemplary naturally occurring Cas9 molecules are described in Chylinski et al., RNA Biology 2013 10:5, 727-737 and additional Cas9 orthologs are described in International PCT Publication No. WO 2015/071474. Such Cas9 molecules include Cas9 molecules of a cluster 1 bacterial family, cluster 2 bacterial family, cluster 3 bacterial family, cluster 4 bacterial family, cluster 5 bacterial family, cluster 6 bacterial family, a cluster 7 bacterial family, a cluster 8 bacterial family, a cluster 9 bacterial family, a cluster 10 bacterial family, a cluster 1 1 bacterial family, a cluster 12 bacterial family, a cluster 13 bacterial family, a cluster 14 bacterial family, a cluster 15 bacterial family, a cluster 16 bacterial family, a cluster 17 bacterial family, a cluster 18 bacterial family, a cluster 19 bacterial family, a cluster 20 bacterial family, a cluster 21 bacterial family, a cluster 22 bacterial family, a cluster 23 bacterial family, a cluster 24 bacterial family, a cluster 25 bacterial family, a cluster 26 bacterial family, a cluster 27 bacterial family, a cluster 28 bacterial family, a cluster 29 bacterial family, a cluster 30 bacterial family, a cluster 31 bacterial family, a cluster 32 bacterial family, a cluster 33 bacterial family, a cluster 34 bacterial family, a cluster 35 bacterial family, a cluster 36 bacterial family, a cluster 37 bacterial family, a cluster 38 bacterial family, a cluster 39 bacterial family, a cluster 40 bacterial family, a cluster 41 bacterial family, a cluster 42 bacterial family, a cluster 43 bacterial family, a cluster 44 bacterial family, a cluster 45 bacterial family, a cluster 46 bacterial family, a cluster 47 bacterial family, a cluster 48 bacterial family, a cluster 49 bacterial family, a cluster 50 bacterial family, a cluster 51 bacterial family, a cluster 52 bacterial family, a cluster 53 bacterial family, a cluster 54 bacterial family, a cluster 55 bacterial family, a cluster 56 bacterial family, a cluster 57 bacterial family, a cluster 58 bacterial family, a cluster 59 bacterial family, a cluster 60 bacterial family, a cluster 61 bacterial family, a cluster 62 bacterial family, a cluster 63 bacterial family, a cluster 64 bacterial family, a cluster 65 bacterial family, a cluster 66 bacterial family, a cluster 67 bacterial family, a cluster 68 bacterial family, a cluster 69 bacterial family, a cluster 70 bacterial family, a cluster 71 bacterial family, a cluster 72 bacterial family, a cluster 73 bacterial family, a cluster 74 bacterial family, a cluster 75 bacterial family, a cluster 76 bacterial family, a cluster 77 bacterial family, or a cluster 78 bacterial family.

[0141] In some embodiments, the naturally occurring Cas9 polypeptide is selected from the group consisting of SpCas9, SpCas9-HF1, SpCas9-HF2, SpCas9-HF3, SpCas9-HF4, SaCas9, FnCpf, FnCas9, eSpCas9, and NmeCas9. In some embodiments, the Cas9 protein comprises an amino acid sequence having at least 60%, 65%, 70%, 75%, 80%, 85%, 90%, 95%, 96%, 97%, 98%, 99%, or 100% sequence identity to a Cas9 amino acid sequence described in Chylinski et al., RNA Biology 2013 10:5, 727-737; Hou et al., PNAS Early Edition 2013, 1-6).

[0142] In some embodiments, the Cas polypeptide comprises one or more of the following activities:
[0143] a. a nickase activity, i.e., the ability to cleave a single strand, e.g., the non-complementary strand or the complementary strand, of a nucleic acid molecule;
[0144] b. a double stranded nuclease activity, i.e., the ability to cleave both strands of a double stranded nucleic acid and create a double stranded break, which in an embodiment is the presence of two nickase activities;
[0145] c. an endonuclease activity;
[0146] d. an exonuclease activity; and/or
[0147] e. a helicase activity, i.e., the ability to unwind the helical structure of a double stranded nucleic acid.

[0148] In some embodiments, the Cas polypeptide is fused to heterologous proteins that recruit DNA-damage signaling proteins, exonucleases, or phosphatases to further increase the likelihood or the rate of repair of the target sequence by one repair mechanism or another. In some embodiments, a WT Cas polypeptide is co-expressed with a nucleic acid repair template to facilitate the incorporation of an exogenous nucleic acid sequence by homology-directed repair.

[0149] In some embodiments, different Cas proteins (i.e., Cas9 proteins from various species) may be advantageous to use in the various provided methods in order to capitalize on various enzymatic characteristics of the different Cas proteins (e.g., for different PAM sequence preferences; for increased or decreased enzymatic activity; for an increased or decreased level of cellular toxicity; to change the balance between NHEJ, homology-directed repair, single strand breaks, double strand breaks, etc.).

[0150] In some embodiments, the Cas protein is a Cas9 protein derived from S. pyogenes and recognizes the PAM sequence motif NGG, NAG, NGA (Mali et al, Science 2013; 339(6121): 823-826). In some embodiments, the Cas protein is a Cas9 protein derived from S. thermophiles and recognizes the PAM sequence motif NGGNG and/or NNAGAAW (W=A or T) (See, e.g., Horvath et al, Science, 2010; 327(5962): 167-170, and Deveau et al, J Bacteriol 2008; 190(4): 1390-1400). In some embodiments, the Cas protein is a Cas9 protein derived from S. mutans and recognizes the PAM sequence motif NGG and/or NAAR (R=A or G) (See, e.g., Deveau et al, J BACTERIOL 2008; 190(4): 1390-1400). In some embodiments, the Cas protein is a Cas9 protein derived from S. aureus and recognizes the PAM sequence motif NNGRR (R=A or G). In some embodiments, the Cas protein is a Cas9 protein derived from S. aureus and recognizes the PAM sequence motif N GRRT (R=A or G). In some embodiments, the Cas protein is a Cas9 protein derived from S. aureus and recognizes the PAM sequence motif N GRRV (R=A or G). In some embodiments, the Cas protein is a Cas9 protein derived from N. meningitidis and recognizes the PAM sequence motif N GATT or N GCTT (R=A or G, V=A, G or C) (See, e.g., Hou et ah, PNAS 2013, 1-6). In the aforementioned embodiments, N can be any nucleotide residue, e.g., any of A, G, C or T. In some embodiments, the Cas protein is a Cas13a protein derived from Leptotrichia shahii and recognizes the PFS sequence motif of a single 3′ A, U, or C.

[0151] In some embodiments, a polynucleotide encoding a Cas protein is provided. In some embodiments, the polynucleotide encodes a Cas protein that is at least 90% identical to a Cas protein described in International PCT Publication No. WO 2015/071474 or Chylinski et al., RNA Biology 2013 10:5, 727-737. In some embodiments, the polynucleotide encodes a Cas protein that is at least 95%, 96%, 97%, 98%, or 99% identical to a Cas protein described in International PCT Publication No. WO 2015/071474 or Chylinski et al., RNA Biology 2013 10:5, 727-737. In some embodiments, the polynucleotide encodes a Cas protein that is 100% identical to a Cas protein described in International PCT Publication No. WO 2015/071474 or Chylinski et al., RNA Biology 2013 10:5, 727-737.

### 2. Cas Mutants

[0152] In some embodiments, the Cas polypeptides are engineered to alter one or more properties of the Cas polypeptide. For example, in some embodiments, the Cas polypeptide comprises altered enzymatic properties, e.g., altered nuclease activity, (as compared with a naturally occurring or other reference Cas molecule) or altered helicase activity. In some embodiments, an engineered Cas polypeptide can have an alteration that alters its size, e.g., a deletion of amino acid sequence that reduces its size without significant effect on another property of the Cas polypeptide. In some embodiments, an engineered Cas polypeptide comprises an alteration that affects PAM recognition. For example, an engineered Cas polypeptide can be altered to recognize a PAM sequence other than the PAM sequence recognized by the corresponding wild-type Cas protein.

[0153] Cas polypeptides with desired properties can be made in a number of ways, including alteration of a naturally occurring Cas polypeptide or parental Cas polypeptide, to provide a mutant or altered Cas polypeptide having a desired property. For example, one or more mutations can be introduced into the sequence of a parental Cas polypeptide (e.g., a naturally occurring or engineered Cas polypeptide). Such mutations and differences may comprise substitutions (e.g., conservative substitutions or substitutions of non-essential amino acids); insertions; or deletions. In some embodiments, a mutant Cas polypeptide comprises one or more mutations (e.g., at least 1, 2, 3, 4, 5, 10, 15, 20, 30, 40 or 50 mutations) relative to a parental Cas polypeptide.

[0154] In an embodiment, a mutant Cas polypeptide comprises a cleavage property that differs from a naturally occurring Cas polypeptide. In some embodiments, the Cas is a deactivated Cas (dCas) mutant. In such embodiments, the Cas polypeptide does not comprise any intrinsic enzymatic activity and is unable to mediate target nucleic acid cleavage. In such embodiments, the dCas may be fused with a heterologous protein that is capable of modifying the target nucleic acid in a non-cleavage based manner. For example, in some embodiments, a dCas protein is fused to transcription activator or transcription repressor domains (e.g., the Kruppel associated box (KRAB or SKD); the Mad mSIN3 interaction domain (SID or SID4X); the ERF repressor domain (ERD); the MAX-interacting protein 1 (MXI1); methyl-CpG binding protein 2 (MECP2); etc.). In some such cases, the dCas fusion protein is targeted by the ggRNA to a specific location (i.e., sequence) in the target nucleic acid and exerts locus-specific regulation such as blocking RNA polymerase binding to a promoter (which selectively inhibits transcription activator function), and/or modifying the local chromatin status (e.g., when a fusion sequence is used that modifies the target DNA or modifies a polypeptide associated with the target DNA). In some cases, the changes are transient (e.g., transcription repression or activation). In some cases, the changes are inheritable (e.g., when epigenetic modifications are made to the target DNA or to proteins associated with the target DNA, e.g., nucleosomal histones).

[0155] In some embodiments, the dCas is a dCas13 mutant (Konermann et al., Cell 173 (2018), 665-676). These dCas13 mutants can then be fused to enzymes that modify RNA, including adenosine deaminases (e.g., ADAR1 and ADAR2). Adenosine deaminases convert adenine to inosine, which the translational machinery treats like guanine, thereby creating a functional A á G change in the RNA sequence. In some embodiments, the dCas is a dCas9 mutant.

[0156] In some embodiments, the mutant Cas9 is a Cas9 nickase mutant. Cas9 nickase mutants comprise only one catalytically active domain (either the HNH domain or the RuvC domain). The Cas9 nickase mutants retain DNA binding based on gRNA specificity, but are capable of cutting only one strand of DNA resulting in a single-strand break (e.g. a “nick”). In some embodiments, two complementary Cas9 nickase mutants (e.g., one Cas9 nickase mutant with an inactivated RuvC domain, and one Cas9 nickase mutant with an inactivated HNH domain) are expressed in the same cell with two gRNAs corresponding to two respective target sequences; one target sequence on the sense DNA strand, and one on the antisense DNA strand. This dual-nickase system results in staggered double stranded breaks and can increase target specificity, as it is unlikely that two off-target nicks will be generated close enough to generate a double stranded break. In some embodiments, a Cas9 nickase mutant is co-expressed with a nucleic acid repair template to facilitate the incorporation of an exogenous nucleic acid sequence by homology-directed repair.

[0157] In some embodiments, the Cas polypeptides described herein can be engineered to alter the PAM/PFS specificity of the Cas polypeptide. In some embodiments, a mutant Cas polypeptide has a PAM/PFS specificity that is different from the PAM/PFS specificity of the parental Cas polypeptide. For example, a naturally occurring Cas protein can be modified to alter the PAM/PFS sequence that the mutant Cas polypeptide recognizes to decrease off target sites, improve specificity, or eliminate a PAM/PFS recognition requirement. In some embodiments, a Cas protein can be modified to increase the length of the PAM/PFS recognition sequence. In some embodiments, the length of the PAM recognition sequence is at least 4, 5, 6, 7, 8, 9, 10 or 15 amino acids in length. Cas polypeptides that recognize different PAM/PFS sequences and/or have reduced off-target activity can be generated using directed evolution. Exemplary methods and systems that can be used for directed evolution of Cas polypeptides are described, e.g., in Esvelt et al. Nature 2011, 472(7344): 499-503.

[0158] Exemplary Cas mutants are described in International PCT Publication No. WO 2015/161276 and Konermann et al., Cell 173 (2018), 665-676 which are incorporated herein by reference in their entireties.

3. gRNAs

[0159] The present disclosure provides guide RNAs (gRNAs) that direct a site-directed modifying polypeptide to a specific target nucleic acid sequence. A gRNA comprises a “nucleic acid-targeting domain” or “targeting domain” and protein-binding segment. The targeting domain may also be referred to as a “spacer” sequence and comprises a nucleotide sequence that is complementary to a target nucleic acid sequence. As such, the targeting domain segment of a gRNA interacts with a target nucleic acid in a sequence-specific manner via hybridization (i.e., base pairing) and determines the location within the target nucleic acid that the gRNA will bind. The targeting domain segment of a gRNA can be modified (e.g., by genetic engineering) to hybridize to a desired sequence within a target nucleic acid sequence. In some embodiments, the targeting domain sequence is between about 13 and about 22 nucleotides in length. In some embodiments, the targeting domain sequence is about 13, 14, 15, 16, 17, 18, 19, 20, 21, or 22 nucleotides in length. In some embodiments, the targeting domain sequence is about 20 nucleotides in length.

[0160] The protein-binding segment of a gRNA interacts with a site-directed modifying polypeptide (e.g. a Cas protein) to form a ribonucleoprotein (RNP) complex comprising the gRNA and the site-directed modifying polypeptide. The targeting domain segment of the gRNA then guides the bound site-directed modifying polypeptide to a specific nucleotide sequence within target nucleic acid via the above-described spacer sequence. The protein-binding segment of a gRNA comprises at least two stretches of nucleotides that are complementary to one another and which form a double stranded RNA duplex. The protein-binding segment of a gRNA may also be referred to as a “scaffold” segment or a “tracr RNA”. In some embodiments, the tracr RNA sequence is between about 30 and about 180 nucleotides in length. In some embodiments, the tracr RNA sequence is between about 40 and about 90 nucleotides, about 50 and about 90 nucleotides, about 60 and about 90 nucleotides, about 65 and about 85 nucleotides, about 70 and about 80 nucleotides, about 65 and about 75 nucleotides, or about 75 and about 85 nucleotides in length. In some embodiments, the tracr RNA sequence is about 70, 71, 72, 73, 74, 75, 76, 77, 78, 79, 80, 81, 82, 83, 84, 85, 86, 87, 88, or about 90 nucleotides in length.

[0161] In some embodiments, a gRNA comprises two separate RNA molecules (i.e., a “dual gRNA”). In some embodiments, a gRNA comprises a single RNA molecule (i.e. a “single guide RNA” or “sgRNA”). Herein, use of the term “guide RNA” or “gRNA” is inclusive of both dual gRNAs and sgRNAs. A dual gRNA comprises two separate RNA molecules: a “crispr RNA” (or “crRNA”) and a “tracr RNA”. A crRNA molecule comprises a spacer sequence covalently linked to a “tracr mate” sequence. The tracer mate sequence comprises a stretch of nucleotides that are complementary to a corresponding sequence in the tracr RNA molecule. The crRNA molecule and tracr RNA molecule hybridize to one another via the complementarity of the tracr and tracer mate sequences.

[0162] In some embodiments, the gRNA is an sgRNA. In such embodiments, the nucleic acid-targeting sequence and the protein-binding sequence are present in a single RNA molecule by fusion of the spacer sequence to the tracr RNA sequence. In some embodiments, the sgRNA is about 50 to about 200 nucleotides in length. In some embodiments, the sgRNA is about 75 to about 150 or about 100 to about 125 nucleotides in length. In some embodiments, the sgRNA is about 100 nucleotides in length.

[0163] In some embodiments, the gRNAs of the present disclosure comprise a targeting domain sequence that is least 90%, 95%, 96%, 97%, 98%, or 99% complementary, or is 100% complementary to a target nucleic acid sequence within a target locus. In some embodiments, the target nucleic acid sequence is an RNA target sequence. In some embodiments, the target nucleic acid sequence is a DNA target sequence. In some embodiments, the target sequence comprises the nucleic acid sequence of a target gene comprising SCN9A, TRPV1, MRGPRX1, or KCNQ2. In some embodiments, the target nucleic acid sequence has at least about 80%, at least about 85%, at least about 90%, at least about 95% or about 100% identity to any one of SEQ ID NOs: 1, 3, 4, or 10. In some embodiments, the target nucleic acid sequence comprises one or more of SEQ NOs: 1, 3, 4, or 10. In some embodiments, the gRNAs provided herein comprise a targeting domain sequence that binds to a target DNA sequence that is at least 90%, 95%, 96%, 97%, 98%, or 99% identical, or is 100% identical to a sequence of a target gene selected from SCN9A, TRPV1, MRGPRX1, or KCNQ2. In some embodiments, the targeting domain sequence binds to a target DNA sequence that is at least 90%, 95%, 96%, 97%, 98%, or 99% identical, or is 100% identical to any one of SEQ ID NOs: 1, 3, 4, or 10.

[0164] In some embodiments, the gene-regulating system comprises two or more gRNA molecules. In some embodiments, the gene-regulating system comprises two or more gRNA molecules, wherein at least one of the gRNAs comprises a targeting domain that binds to a target DNA sequence that is at least 90%, 95%, 96%, 97%, 98%, or 99% identical, or is 100% identical to a target sequence of a target gene selected from SCN9A, TRPV1, MRGPRX1, or KCNQ2.

[0165] In some embodiments, the nucleic acid-binding segments of the gRNA sequences described herein are designed to minimize off-target binding using algorithms known in the art (e.g., Cas-OFF finder) to identify target sequences that are unique to a particular target locus or target gene.

[0166] In some embodiments, the gRNAs described herein can comprise one or more modified nucleosides or nucleotides which introduce stability toward nucleases. In such embodiments, these modified gRNAs may elicit a reduced innate immune as compared to a non-modified gRNA. The term “innate immune response” includes a cellular response to exogenous nucleic acids, including single stranded nucleic acids, generally of viral or bacterial origin, which involves the induction of cytokine expression and release, particularly the interferons, and cell death.

[0167] In some embodiments, the gRNAs described herein are modified at or near the 5′ end (e.g., within 1-10, 1-5, or 1-2 nucleotides of their 5′ end). In some embodiments, the 5′ end of a gRNA is modified by the inclusion of a eukaryotic mRNA cap structure or cap analog (e.g., a G(5′)ppp(5′)G cap analog, a m7G(5′)ppp(5′)G cap analog, or a 3′-O-Me-m7G(5′)ppp(5′)G anti reverse cap analog (ARCA)). In some embodiments, an in vitro transcribed gRNA is modified by treatment with a phosphatase (e.g., calf intestinal alkaline phosphatase) to remove the 5′ triphosphate group. In some embodiments, a gRNA comprises a modification at or near its 3′ end (e.g., within 1-10, 1-5, or 1-2 nucleotides of its 3′ end). For example, in some embodiments, the 3′ end of a gRNA is modified by the addition of one or more (e.g., 25-200) adenine (A) residues.

[0168] In some embodiments, modified nucleosides and modified nucleotides can be present in a gRNA, but also may be present in other gene-regulating systems, e.g., mRNA, RNAi, or siRNA-based systems. In some embodiments, modified nucleosides and nucleotides can include one or more of:
[0169] a. alteration, e.g., replacement, of one or both of the non-linking phosphate oxygens and/or of one or more of the linking phosphate oxygens in the phosphodiester backbone linkage;
[0170] b. alteration, e.g., replacement, of a constituent of the ribose sugar, e.g., of the 2′ hydroxyl on the ribose sugar;
[0171] c. wholesale replacement of the phosphate moiety with “dephospho” linkers;
[0172] d. modification or replacement of a naturally occurring nucleobase;
[0173] e. replacement or modification of the ribose-phosphate backbone;
[0174] f. modification of the 3′ end or 5′ end of the oligonucleotide, e.g., removal, modification or replacement of a terminal phosphate group or conjugation of a moiety; and
[0175] g. modification of the sugar.

[0176] In some embodiments, the modifications listed above can be combined to provide modified nucleosides and nucleotides that can have two, three, four, or more modifications. For example, in some embodiments, a modified nucleoside or nucleotide can have a modified sugar and a modified nucleobase. In some embodiments, every base of a gRNA is modified. In some embodiments, each of the phosphate groups of a gRNA molecule are replaced with phosphorothioate groups.

[0177] In some embodiments, a software tool can be used to optimize the choice of gRNA within a user's target sequence, e.g., to minimize total off-target activity across the genome. Off target activity may be other than cleavage. For example, for each possible gRNA choice using S. pyogenes Cas9, software tools can identify all potential off-target sequences (preceding either NAG or NGG PAMs) across the genome that contain up to a certain number (e.g., 1, 2, 3, 4, 5, 6, 7, 8, 9, or 10) of mismatched base-pairs. The cleavage efficiency at each off-target sequence can be predicted, e.g., using an experimentally-derived weighting scheme. Each possible gRNA can then be ranked according to its total predicted off-target cleavage; the top-ranked gRNAs represent those that are likely to have the greatest on-target and the least off-target cleavage. Other functions, e.g., automated reagent design for gRNA vector construction, primer design for the on-target Surveyor assay, and primer design for high-throughput detection and quantification of off-target cleavage via next-generation sequencing, can also be included in the tool.

[0178] In some embodiments, the present disclosure provides polynucleotides or nucleic acid molecules encoding a gene-regulating system described herein. Polynucleotides may be single-stranded or double-stranded and either recombinant, synthetic, or isolated. Polynucleotides include, but are not limited to: pre-messenger RNA (pre-mRNA), messenger RNA (mRNA), RNA, genomic DNA (gDNA), PCR amplified DNA, complementary DNA (cDNA), synthetic DNA, or recombinant DNA. Polynucleotides refer to a polymeric form of nucleotides of at least 5, at least 10, at least 15, at least 20, at least 25, at least 30, at least 40, at least 50, at least 100, at least 200, at least 300, at least 400, at least 500, at least 1000, at least 5000, at least 10000, or at least 15000 or more nucleotides in length, either ribonucleotides or deoxyribonucleotides or a modified form of either type of nucleotide, as well as all intermediate lengths. It will be readily understood that “intermediate lengths,” in this context, means any length between the quoted values, such as 6, 7, 8, 9, etc., 101, 102, 103, etc.; 151, 152, 153, etc.; 201, 202, 203, etc.

[0179] In particular embodiments, polynucleotides may be codon-optimized. As used herein, the term “codon-optimized” refers to substituting codons in a polynucleotide encoding a polypeptide in order to increase the expression, stability and/or activity of the polypeptide. Factors that influence codon optimization include, but are not limited to one or more of: (i) variation of codon biases between two or more organisms or genes or synthetically constructed bias tables, (ii) variation in the degree of codon bias within an organism, gene, or set of genes, (iii) systematic variation of codons including context, (iv) variation of codons according to their decoding tRNAs, (v) variation of codons according to GC %, either overall or in one position of the triplet, (vi) variation in degree of similarity to a reference sequence for example a naturally occurring sequence, (vii) variation in the codon frequency cutoff, (viii) structural properties of mRNAs transcribed from the DNA sequence, (ix) prior knowledge about the function of the DNA sequences upon which design of the codon substitution set is to be based, (x) systematic variation of codon sets for each amino acid, (xi) isolated removal of spurious translation initiation sites and/or (xii) elimination of fortuitous polyadenylation sites otherwise leading to truncated RNA transcripts.

[0180] As used herein, the terms “polynucleotide variant” and “variant” and the like refer to polynucleotides displaying substantial sequence identity with a reference polynucleotide sequence or polynucleotides that hybridize with a reference sequence under stringent conditions that are defined hereinafter. These terms include polynucleotides in which one or more nucleotides have been added or deleted, or replaced with different nucleotides compared to a reference polynucleotide. In this regard, it is well understood in the art that certain alterations inclusive of mutations, additions, deletions and substitutions can be made to a reference polynucleotide whereby the altered polynucleotide retains the biological function or activity of the reference polynucleotide.

[0181] In particular embodiments, polynucleotides or variants have at least or about 50%, 55%, 60%, 65%, 70%, 71%, 72%, 73%, 74%, 75%, 76%, 77%, 78%, 79%, 80%, 81%, 82%, 83%, 84%, 85%, 86%, 87%, 88%, 89%, 90%, 91%, 92%, 93%, 94%, 95%, 96%, 97%, 98%, 99% or 100% sequence identity to a reference sequence.

[0182] Moreover, it will be appreciated by those of ordinary skill in the art that, as a result of the degeneracy of the genetic code, there are many nucleotide sequences that encode a polypeptide, or fragment of variant thereof, as described herein. Some of these polynucleotides bear minimal homology to the nucleotide sequence of any native gene. Nonetheless, polynucleotides that vary due to differences in codon usage are specifically contemplated in particular embodiments, for example polynucleotides that are optimized for human and/or primate codon selection. Further, alleles of the genes comprising the polynucleotide sequences provided herein may also be used. Alleles are endogenous genes that are altered as a result of one or more mutations, such as deletions, additions and/or substitutions of nucleotides.

[0183] The polynucleotides contemplated herein, regardless of the length of the coding sequence itself, may be combined with other DNA sequences, such as promoters and/or enhancers, untranslated regions (UTRs), signal sequences, Kozak sequences, polyadenylation signals, additional restriction enzyme sites, multiple cloning sites, internal ribosomal entry sites (IRES), recombinase recognition sites (e.g., LoxP, FRT, and Att sites), termination codons, transcriptional termination signals, and polynucleotides encoding self-cleaving polypeptides, epitope tags, as disclosed elsewhere herein or as known in the art, such that their overall length may vary considerably. It is therefore contemplated that a polynucleotide fragment of almost any length may be employed in particular embodiments, with the total length preferably being limited by the ease of preparation and use in the intended recombinant DNA protocol.

[0184] Polynucleotides can be prepared, manipulated and/or expressed using any of a variety of well-established techniques known and available in the art.

### Polynucleotides

[0185] In some embodiments, the present disclosure provides polynucleotides or nucleic acid molecules encoding a gene-regulating system described herein. Polynucleotides may be single-stranded or double-stranded and either recombinant, synthetic, or isolated. Polynucleotides include, but are not limited to: pre-messenger RNA (pre-mRNA), messenger RNA (mRNA), RNA, genomic DNA (gDNA), PCR amplified DNA, complementary DNA (cDNA), synthetic DNA, or recombinant DNA. Polynucleotides refer to a polymeric form of nucleotides of at least 5, at least 10, at least 15, at least 20, at least 25, at least 30, at least 40, at least 50, at least 100, at least 200, at least 300, at least 400, at least 500, at least 1000, at least 5000, at least 10000, or at least 15000 or more nucleotides in length, either ribonucleotides or deoxyribonucleotides or a modified form of either type of nucleotide, as well as all intermediate lengths. It will be readily understood that “intermediate lengths,” in this context, means any length between the quoted values, such as 6, 7, 8, 9, etc., 101, 102, 103, etc.; 151, 152, 153, etc.; 201, 202, 203, etc.

[0186] In particular embodiments, polynucleotides may be codon-optimized. As used herein, the term “codon-optimized” refers to substituting codons in a polynucleotide encoding a polypeptide in order to increase the expression, stability and/or activity of the polypeptide. Factors that influence codon optimization include, but are not limited to one or more of: (i) variation of codon biases between two or more organisms or genes or synthetically constructed bias tables, (ii) variation in the degree of codon bias within an organism, gene, or set of genes, (iii) systematic variation of codons including context, (iv) variation of codons according to their decoding tRNAs, (v) variation of codons according to GC %, either overall or in one position of the triplet, (vi) variation in degree of similarity to a reference sequence for example a naturally occurring sequence, (vii) variation in the codon frequency cutoff, (viii) structural properties of mRNAs transcribed from the DNA sequence, (ix) prior knowledge about the function of the DNA sequences upon which design of the codon substitution set is to be based, (x) systematic variation of codon sets for each amino acid, (xi) isolated removal of spurious translation initiation sites and/or (xii) elimination of fortuitous polyadenylation sites otherwise leading to truncated RNA transcripts.

[0187] As used herein, the terms “polynucleotide variant” and “variant” and the like refer to polynucleotides displaying substantial sequence identity with a reference polynucleotide sequence or polynucleotides that hybridize with a reference sequence under stringent conditions that are defined hereinafter. These terms include polynucleotides in which one or more nucleotides have been added or deleted, or replaced with different nucleotides compared to a reference polynucleotide. In this regard, it is well understood in the art that certain alterations inclusive of mutations, additions, deletions and substitutions can be made to a reference polynucleotide whereby the altered polynucleotide retains the biological function or activity of the reference polynucleotide.

[0188] In particular embodiments, polynucleotides or variants have at least or about 50%, 55%, 60%, 65%, 70%, 71%, 72%, 73%, 74%, 75%, 76%, 77%, 78%, 79%, 80%, 81%, 82%, 83%, 84%, 85%, 86%, 87%, 88%, 89%, 90%, 91%, 92%, 93%, 94%, 95%, 96%, 97%, 98%, 99% or 100% sequence identity to a reference sequence.

[0189] Moreover, it will be appreciated by those of ordinary skill in the art that, as a result of the degeneracy of the genetic code, there are many nucleotide sequences that encode a polypeptide, or fragment of variant thereof, as described herein. Some of these polynucleotides bear minimal homology to the nucleotide sequence of any native gene. Nonetheless, polynucleotides that vary due to differences in codon usage are specifically contemplated in particular embodiments, for example polynucleotides that are optimized for human and/or primate codon selection. Further, alleles of the genes comprising the polynucleotide sequences provided herein may also be used. Alleles are endogenous genes that are altered as a result of one or more mutations, such as deletions, additions and/or substitutions of nucleotides.

[0190] The polynucleotides contemplated herein, regardless of the length of the coding sequence itself, may be combined with other DNA sequences, such as promoters and/or enhancers, untranslated regions (UTRs), signal sequences, Kozak sequences, polyadenylation signals, additional restriction enzyme sites, multiple cloning sites, internal ribosomal entry sites (IRES), recombinase recognition sites (e.g., LoxP, FRT, and Att sites), termination codons, transcriptional termination signals, and polynucleotides encoding self-cleaving polypeptides, epitope tags, as disclosed elsewhere herein or as known in the art, such that their overall length may vary considerably. It is therefore contemplated that a polynucleotide fragment of almost any length may be employed in particular embodiments, with the total length preferably being limited by the ease of preparation and use in the intended recombinant DNA protocol.

[0191] Polynucleotides can be prepared, manipulated and/or expressed using any of a variety of well-established techniques known and available in the art.

### Vectors

[0192] In order to express a gene-regulating system described herein in a cell, an expression cassette encoding the gene-regulating system can be inserted into appropriate vector. The term “nucleic acid vector” is used herein to refer to a nucleic acid molecule capable transferring or transporting another nucleic acid molecule. The transferred nucleic acid is generally linked to, e.g., inserted into, the vector nucleic acid molecule. A nucleic acid vector may include sequences that direct autonomous replication in a cell, or may include sequences sufficient to allow integration into host cell DNA.

[0193] In particular embodiments, vectors include, without limitation, plasmids, phagemids, cosmids, transposons, artificial chromosomes such as yeast artificial chromosome (YAC), bacterial artificial chromosome (BAC), or P1-derived artificial chromosome (PAC), bacteriophages such as lambda phage or M13 phage, and animal viruses. In particular embodiments, the coding sequences of the gene-regulating systems disclosed herein can be ligated into such vectors for the expression of the gene-regulating systems in mammalian cells.

[0194] In some embodiments, non-viral vectors are used to deliver one or more polynucleotides contemplated herein to an pluripotent stem cell, e.g., a T cell. In some embodiments, the recombinant vector comprising a polynucleotide encoding one or more components of a gene-regulating system described herein is a plasmid. Numerous suitable plasmid expression vectors are known to those of skill in the art, and many are commercially available. The following vectors are provided by way of example; for eukaryotic host cells: pXT1, pSG5 (Stratagene), pSVK3, pBPV, pMSG, and pSVLSV40 (Pharmacia). However, any other plasmid vector may be used so long as it is compatible with the host cell. Depending on the cell type and gene-regulating system utilized, any of a number of suitable transcription and translation control elements, including constitutive and inducible promoters, transcription enhancer elements, transcription terminators, etc. may be used in the expression vector (see e.g., Bitter et al. (1987) Methods in Enzymology, 153:516-544).

[0195] In some embodiments, the recombinant vector comprising a polynucleotide encoding one or more components of a gene-regulating system described herein is a viral vector. Suitable viral vectors include, but are not limited to, viral vectors based on vaccinia virus; poliovirus; adenovirus (see, e.g., Li et al., Invest Opthalmol Vis Sci 35:2543 2549, 1994; Borras et al., Gene Ther 6:515 524, 1999; Li and Davidson, PNAS 92:7700 7704, 1995; Sakamoto et al., H Gene Ther 5:1088 1097, 1999; WO 94/12649, WO 93/03769; WO 93/19191; WO 94/28938; WO 95/11984 and WO 95/00655); adeno-associated virus (see, e.g., U.S. Pat. No. 7,078,387; Ali et al., Hum Gene Ther 9:81 86, 1998, Flannery et al, PNAS 94:6916 6921, 1997; Bennett et al., Invest Opthalmol Vis Sci 38:2857 2863, 1997; Jomary et al., Gene Ther 4:683 690, 1997, Rolling et al., Hum Gene Ther 10:641 648, 1999; Ali et al., Hum Mol Genet 5:591 594, 1996; Srivastava in WO 93/09239, Samulski et al., J. Vir. (1989) 63:3822-3828; Mendelson et al, Virol. (1988) 166:154-165; and Flotte et al., PNAS (1993) 90:10613-10617); SV40; herpes simplex virus; human immunodeficiency virus (see, e.g., Miyoshi et al., PNAS 94:10319 23, 1997; Takahashi et al., J Virol 73:7812 7816, 1999); a retroviral vector (e.g., Murine Leukemia Virus, spleen necrosis virus, and vectors derived from retroviruses such as Rous Sarcoma Virus, Harvey Sarcoma Virus, avian leukosis virus, a lentivirus, human immunodeficiency virus, myeloproliferative sarcoma virus, and mammary tumor virus); and the like. Examples of vectors are pClneo vectors (Promega) for expression in mammalian cells; pLenti4/V5-DEST™, pLenti6/V5-DEST™, and pLenti6.2/V5-GW/lacZ (Invitrogen) for lentivirus-mediated gene transfer and expression in mammalian cells.

[0196] In some embodiments, the vector is a non-integrating vector, including but not limited to, an episomal vector or a vector that is maintained extrachromosomally. As used herein, the term “episomal” refers to a vector that is able to replicate without integration into host's chromosomal DNA and without gradual loss from a dividing host cell also meaning that said vector replicates extrachromosomally or episomally. The vector is engineered to harbor the sequence coding for the origin of DNA replication or “ori” from a lymphotrophic herpes virus or a gamma herpesvirus, an adenovirus, SV40, a bovine papilloma virus, or a yeast, specifically a replication origin of a lymphotrophic herpes virus or a gamma herpesvirus corresponding to oriP of EBV. In a particular aspect, the lymphotrophic herpes virus may be Epstein Barr virus (EBV), Kaposi's sarcoma herpes virus (KSHV), Herpes virus saimiri (HS), or Marek's disease virus (MDV). Epstein Barr virus (EBV) and Kaposi's sarcoma herpes virus (KSHV) are also examples of a gamma herpesvirus.

[0197] In some embodiments, a polynucleotide is introduced into a target or host cell using a transposon vector system. In certain embodiments, the transposon vector system comprises a vector comprising transposable elements and a polynucleotide contemplated herein; and a transposase. In one embodiment, the transposon vector system is a single transposase vector system, see, e.g., WO 2008/027384. Exemplary transposases include, but are not limited to: piggyBac, Sleeping Beauty, Mos1, Tc1/mariner, Tol2, mini-Tol2, Tc3, MuA, Himar I, Frog Prince, and derivatives thereof. The piggyBac transposon and transposase are described, for example, in U.S. Pat. No. 6,962,810, which is incorporated herein by reference in its entirety. The Sleeping Beauty transposon and transposase are described, for example, in Izsvak et al., J. Mol. Biol. 302: 93-102 (2000), which is incorporated herein by reference in its entirety. The Tol2 transposon which was first isolated from the medaka fish Oryzias latipes and belongs to the hAT family of transposons is described in Kawakami et al. (2000). Mini-Tol2 is a variant of Tol2 and is described in Balciunas et al. (2006). The Tol2 and Mini-Tol2 transposons facilitate integration of a transgene into the genome of an organism when co-acting with the Tol2 transposase. The Frog Prince transposon and transposase are described, for example, in Miskey et al., Nucleic Acids Res. 31:6873-6881 (2003).

[0198] In some embodiments, a polynucleotide sequence encoding one or more components of a gene-regulating system described herein is operably linked to a control element, e.g., a transcriptional control element, such as a promoter. “Control elements” refer those non-translated regions of the vector (e.g., origin of replication, selection cassettes, promoters, enhancers, translation initiation signals (Shine Dalgarno sequence or Kozak sequence) introns, a polyadenylation sequence, 5′ and 3′ untranslated regions) which interact with host cellular proteins to carry out transcription and translation. Such elements may vary in their strength and specificity. The transcriptional control element may be functional in either a eukaryotic cell (e.g., a mammalian cell) or a prokaryotic cell (e.g., bacterial or archaeal cell). In some embodiments, a polynucleotide sequence encoding one or more components of a gene-regulating system described herein is operably linked to multiple control elements that allow expression of the polynucleotide in both prokaryotic and eukaryotic cells.

[0199] Depending on the cell type and gene-regulating system utilized, any of a number of suitable transcription and translation control elements, including constitutive and inducible promoters, transcription enhancer elements, transcription terminators, etc. may be used in the expression vector (see e.g., Bitter et al. (1987) Methods in Enzymology, 153:516-544). An RNA polymerase initiates and transcribes polynucleotides operably linked to the promoter. In particular embodiments, promoters operative in mammalian cells comprise an AT-rich region located approximately 25 to 30 bases upstream from the site where transcription is initiated and/or another sequence found 70 to 80 bases upstream from the start of transcription, a CNCAAT region where N may be any nucleotide. The term “enhancer” refers to a segment of DNA which contains sequences capable of providing enhanced transcription and in some instances can function independent of their orientation relative to another control sequence. An enhancer can function cooperatively or additively with promoters and/or other enhancer elements.

[0200] In some embodiments, polynucleotides encoding one or more components of a gene-regulating system described herein are operably linked to a promoter. The term “operably linked”, refers to a juxtaposition wherein the components described are in a relationship permitting them to function in their intended manner. In one embodiment, the term refers to a functional linkage between a nucleic acid expression control sequence (such as a promoter, and/or enhancer) and a second polynucleotide sequence, e.g., a polynucleotide encoding one or more components of a gene-regulating system, wherein the expression control sequence directs transcription of the nucleic acid corresponding to the second sequence.

[0201] Non-limiting examples of suitable eukaryotic promoters (promoters functional in a eukaryotic cell) include those from cytomegalovirus (CMV) immediate early, herpes simplex virus (HSV) thymidine kinase, a viral simian virus 40 (SV40) (e.g., early and late SV40), a spleen focus forming virus (SFFV) promoter, long terminal repeats (LTRs) from retrovirus (e.g., a Moloney murine leukemia virus (MoMLV) LTR promoter or a Rous sarcoma virus (RSV) LTR), a herpes simplex virus (HSV) (thymidine kinase) promoter, H5, P7.5, and P11 promoters from vaccinia virus, an elongation factor 1-alpha (EF1α) promoter, early growth response 1 (EGR1) promoter, a ferritin H (FerH) promoter, a ferritin L (FerL) promoter, a Glyceraldehyde 3-phosphate dehydrogenase (GAPDH) promoter, a eukaryotic translation initiation factor 4A1 (EIF4A1) promoter, a heat shock 70 kDa protein 5 (HSPA5) promoter, a heat shock protein 90 kDa beta, member 1 (HSP90B1) promoter, a heat shock protein 70 kDa (HSP70) promoter, a 0-kinesin (0-KIN) promoter, the human ROSA 26 locus (Irions et al., Nature Biotechnology 25, 1477-1482 (2007)), a Ubiquitin C (UBC) promoter, a phosphoglycerate kinase-1 (PGK) promoter, a cytomegalovirus enhancer/chicken 3-actin (CAG) promoter, a 3-actin promoter and a myeloproliferative sarcoma virus enhancer, negative control region deleted, dl587rev primer-binding site substituted (MND) promoter, and mouse metallothionein-1. Selection of the appropriate vector and promoter is well within the level of ordinary skill in the art. The expression vector may also contain a ribosome binding site for translation initiation and a transcription terminator. The expression vector may also include appropriate sequences for amplifying expression. The expression vector may also include nucleotide sequences encoding protein tags (e.g., 6×His tag, hemagglutinin tag, green fluorescent protein, etc.) that are fused to the site-directed modifying polypeptide, thus resulting in a chimeric polypeptide.

[0202] In some embodiments, a polynucleotide sequence encoding one or more components of a gene-regulating system described herein is operably linked to a constitutive promoter. In such embodiments, the polynucleotides encoding one or more components of a gene-regulating system described herein are constitutively and/or ubiquitously expressed in a cell.

[0203] In some embodiments, a polynucleotide sequence encoding one or more components of a gene-regulating system described herein is operably linked to an inducible promoter. In such embodiments, polynucleotides encoding one or more components of a gene-regulating system described herein are conditionally expressed. As used herein, “conditional expression” may refer to any type of conditional expression including, but not limited to, inducible expression; repressible expression; expression in cells or tissues having a particular physiological, biological, or disease state (e.g., cell type or tissue specific expression) etc. Illustrative examples of inducible promoters/systems include, but are not limited to, steroid-inducible promoters such as promoters for genes encoding glucocorticoid or estrogen receptors (inducible by treatment with the corresponding hormone), metallothionine promoter (inducible by treatment with various heavy metals), MX-1 promoter (inducible by interferon), the “GeneSwitch” mifepristone-regulatable system (Sirin et al., 2003, Gene, 323:67), the cumate inducible gene switch (WO 2002/088346), tetracycline-dependent regulatory systems, etc.

[0204] In some embodiments, the vectors described herein further comprise a transcription termination signal. Elements directing the efficient termination and polyadenylation of the heterologous nucleic acid transcripts increases heterologous gene expression. Transcription termination signals are generally found downstream of the polyadenylation signal. In particular embodiments, vectors comprise a polyadenylation sequence 3′ of a polynucleotide encoding a polypeptide to be expressed. The term “polyA site” or “polyA sequence” as used herein denotes a DNA sequence which directs both the termination and polyadenylation of the nascent RNA transcript by RNA polymerase II. Polyadenylation sequences can promote mRNA stability by addition of a polyA tail to the 3′ end of the coding sequence and thus, contribute to increased translational efficiency. Cleavage and polyadenylation is directed by a poly(A) sequence in the RNA. The core poly(A) sequence for mammalian pre-mRNAs has two recognition elements flanking a cleavage-polyadenylation site. Typically, an almost invariant AAUAAA hexamer lies 20-50 nucleotides upstream of a more variable element rich in U or GU residues. Cleavage of the nascent transcript occurs between these two elements and is coupled to the addition of up to 250 adenosines to the 5′ cleavage product. In particular embodiments, the core poly(A) sequence is an ideal polyA sequence (e.g., AATAAA, ATTAAA, AGTAAA). In particular embodiments, the poly(A) sequence is an SV40 polyA sequence, a bovine growth hormone polyA sequence (BGHpA), a rabbit β-globin polyA sequence (rpgpA), variants thereof, or another suitable heterologous or endogenous polyA sequence known in the art.

[0205] In some embodiments, a vector may also comprise a sequence encoding a signal peptide (e.g., for nuclear localization, nucleolar localization, mitochondrial localization), fused to the polynucleotide encoding the one or more components of the system. For example, a vector may comprise a nuclear localization sequence (e.g., from SV40) fused to the polynucleotide encoding the one or more components of the system.

[0206] Methods of introducing polynucleotides and recombinant vectors into a host cell are known in the art, and any known method can be used to introduce components of a gene-regulating system into a cell. Suitable methods include e.g., viral or bacteriophage infection, transfection, conjugation, protoplast fusion, lipofection, electroporation, calcium phosphate precipitation, polyethyleneimine (PEI)-mediated transfection, DEAE-dextran mediated transfection, liposome-mediated transfection, particle gun technology, calcium phosphate precipitation, direct micro injection, nanoparticle-mediated nucleic acid delivery (see, e.g., Panyam et al., Adv Drug Deliv Rev. 2012 Sep. 13. pii: S0169-409X(12)00283-9), microfluidics delivery methods (See e.g., International PCT Publication No. WO 2013/059343), and the like. In some embodiments, delivery via electroporation comprises mixing the cells with the components of a gene-regulating system in a cartridge, chamber, or cuvette and applying one or more electrical impulses of defined duration and amplitude. In some embodiments, cells are mixed with components of a gene-regulating system in a vessel connected to a device (e.g., a pump) which feeds the mixture into a cartridge, chamber, or cuvette wherein one or more electrical impulses of defined duration and amplitude are applied, after which the cells are delivered to a second vessel. Illustrative examples of polynucleotide delivery systems suitable for use in particular embodiments contemplated in particular embodiments include, but are not limited to, those provided by Amaxa Biosystems, Maxcyte, Inc., BTX Molecular Delivery Systems, Neon™ Transfection Systems, and Copernicus Therapeutics Inc. Lipofection reagents are sold commercially (e.g., Transfectam™ and Lipofectin™). Cationic and neutral lipids that are suitable for efficient lipofection of polynucleotides have been described in the literature. See e.g., Liu et al. (2003) Gene Therapy. 10:180-187; and Balazs et al. (2011) Journal of Drug Delivery. 2011:1-12.

[0207] In some embodiments, vectors comprising polynucleotides encoding one or more components of a gene-regulating system described herein are introduced to cells by viral delivery methods, e.g., by viral transduction. In some embodiments, vectors comprising polynucleotides encoding one or more components of a gene-regulating system described herein are introduced to cells by non-viral delivery methods. Illustrative methods of non-viral delivery of polynucleotides contemplated in particular embodiments include, but are not limited to: electroporation, sonoporation, lipofection, microinjection, biolistics, virosomes, liposomes, immunoliposomes, nanoparticles, polycation or lipid:nucleic acid conjugates, naked DNA, artificial virions, DEAE-dextran-mediated transfer, gene gun, and heat-shock.

[0208] In some embodiments, one or more components of a gene-regulating system, or polynucleotide sequence encoding one or more components of a gene-regulating system described herein are introduced to a cell in a non-viral delivery vehicle, such as a transposon, a nanoparticle (e.g., a lipid nanoparticle), a liposome, an exosome, an attenuated bacterium, or a virus-like particle. In some embodiments, the vehicle is an attenuated bacterium (e.g., naturally or artificially engineered to be invasive but attenuated to prevent pathogenesis including Listeria monocytogenes, certain Salmonella strains, Bifidobacterium longum, and modified Escherichia coli), bacteria having nutritional and tissue-specific tropism to target specific cells, and bacteria having modified surface proteins to alter target cell specificity. In some embodiments, the vehicle is a genetically modified bacteriophage (e.g., engineered phages having large packaging capacity, less immunogenicity, containing mammalian plasmid maintenance sequences and having incorporated targeting ligands). In some embodiments, the vehicle is a mammalian virus-like particle. For example, modified viral particles can be generated (e.g., by purification of the “empty” particles followed by ex vivo assembly of the virus with the desired cargo). The vehicle can also be engineered to incorporate targeting ligands to alter target tissue specificity. In some embodiments, the vehicle is a biological liposome. For example, the biological liposome is a phospholipid-based particle derived from human cells (e.g., erythrocyte ghosts, which are red blood cells broken down into spherical structures derived from the subject and wherein tissue targeting can be achieved by attachment of various tissue or cell-specific ligands), secretory exosomes, or subject derived membrane-bound nanovesicles (30-100 nm) of endocytic origin (e.g., can be produced from various cell types and can therefore be taken up by cells without the need for targeting ligands).

### AAV Viral Vectors

[0209] In some embodiments, the vector is a viral vector. A number of viral based systems have been developed for gene transfer into mammalian cells. Examples of viral vectors include, but are not limited to, adenoviral vectors, adeno-associated virus vectors, lentiviral vector, retroviral vectors, vaccinia vector, herpes simplex viral vector, and derivatives thereof. Viral vector technology is well known in the art and is described, for example, in Sambrook et al. (2001, Molecular Cloning: A Laboratory Manual, Cold Spring Harbor Laboratory, New York), and in other virology and molecular biology manuals. In some embodiments, the viral vector is a recombinant adeno-associated virus (rAAV) vector.

[0210] The rAAV vector can be derived from any AAV serotypes or variants thereof. In some embodiments, the rAAV vector is derived from AAV1 or a variant thereof. In some embodiments, the rAAV vector is derived from AAV2 or a variant thereof. In some embodiments, the rAAV vector is derived from AAV2i8 or a variant thereof. In some embodiments, the rAAV vector is derived from AAV3 or a variant thereof. In some embodiments, the rAAV vector is derived from AAV3-B or a variant thereof. In some embodiments, the rAAV vector is derived from AAV4 or a variant thereof. In some embodiments, the rAAV vector is derived from AAV5 or a variant thereof. In some embodiments, the rAAV vector is derived from AAV6 or a variant thereof. In some embodiments, the rAAV vector is derived from AAV7 or a variant thereof. In some embodiments, the rAAV vector is derived from AAV8 or a variant thereof. In some embodiments, the rAAV vector is derived from AAVrh8 or a variant thereof. In some embodiments, the rAAV vector is derived from AAVrh8R or a variant thereof. In some embodiments, the rAAV vector is derived from AAV9 or a variant thereof. In some embodiments, the rAAV vector is derived from AAV10 or a variant thereof. In some embodiments, the rAAV vector is derived from AAVrh10 or a variant thereof. In some embodiments, the rAAV vector is derived from AAV11 or a variant thereof. In some embodiments, the rAAV vector is derived from AAV12 or a variant thereof.

[0211] In some embodiments, the AAV vector is an AVV8 vector, an AAV1 vector, an AAV6.2 vector, an AAVrh74 vector, an AAV9 vector, or an AAVPHP.s. An AAV vector can be implemented in dual AAV-mediated delivery. In some embodiments, the AAV mediated delivery comprises TRPV1, sgRNA and SaCas9. In some embodiments, the AAV mediated delivery comprises SCN9A, sgRNA and SaCas9. In some embodiments, the AAV mediated delivery comprises KCNQ2. In some embodiments, the dual AAV-mediated delivery comprises a nucleic acid sequence comprising at least about 85%, at least about 90%, at least about 95%, or at least about 100% identity to SEQ ID NOs: 5-7. In some embodiments, the dual AAV-mediated delivery comprises a nucleic acid sequence comprising at least about 85%, at least about 90%, at least about 95%, or at least about 100% identity to SEQ ID NOs: 5, 8 and 9. In some embodiments, the dual AAV-mediated delivery comprises a nucleic acid sequence comprising at least about 85%, at least about 90%, at least about 95%, or at least about 100% identity to SEQ ID NOs: 11, 12, or 13. In some embodiments, the dual AAV-mediated delivery comprises a nucleic acid sequence comprising at least about 85%, at least about 90%, at least about 95%, or at least about 100% identity to SEQ ID NOs: 14, 15, or 16.

### Methods of Producing Modified Pluripotent Stem Cells

[0212] In some embodiments, the present disclosure provides methods for producing modified stem cells. In some embodiments, the present disclosure provides methods for producing modified pluripotent stem cells. In some embodiments, the methods comprise introducing a gene-regulating system into a population of pluripotent stem cells wherein the gene-regulating system is capable of reducing expression and/or function of one or more endogenous target genes.

[0213] The components of the gene-regulating systems described herein, e.g., a nucleic acid-, protein-, or nucleic acid/protein-based system can be introduced into target cells in a variety of forms using a variety of delivery methods and formulations. In some embodiments, a polynucleotide encoding one or more components of the system is delivered by a recombinant vector (e.g., a viral vector or plasmid, described supra). In some embodiments, where the system comprises more than a single component, a vector may comprise a plurality of polynucleotides, each encoding a component of the system. In some embodiments, where the system comprises more than a single component, a plurality of vectors may be used, wherein each vector comprises a polynucleotide encoding a particular component of the system. In some embodiments, the introduction of the gene-regulating system to the cell occurs in vitro. In some embodiments, the introduction of the gene-regulating system to the cell occurs in vivo. In some embodiments, the introduction of the gene-regulating system to the cell occurs ex vivo.

[0214] In particular embodiments, the introduction of the gene-regulating system to the cell occurs in vitro or ex vivo. In some embodiments, the pluripotent stem cells are modified in vitro or ex vivo without further manipulation in culture. For example, in some embodiments, the methods of producing a modified pluripotent stem cell described herein comprise introduction of a gene-regulating system in vitro or ex vivo without additional activation and/or expansion steps. In some embodiments, the pluripotent stem cells are modified and are further manipulated in vitro or ex vivo. For example, in some embodiments, the pluripotent stem cells are activated and/or expanded in vitro or ex vivo prior to introduction of a gene-regulating system. In some embodiments, a gene-regulating system is introduced to the pluripotent stem cells and are then activated and/or expanded in vitro or ex vivo. In some embodiments, successfully modified cells can be sorted and/or isolated (e.g., by flow cytometry) from unsuccessfully modified cells to produce a purified population of modified pluripotent stem cells. These successfully modified cells can then be further propagated to increase the number of the modified cells and/or cryopreserved for future use.

[0215] In some embodiments, the present disclosure provides methods for producing modified pluripotent stem cells comprising obtaining a population of pluripotent stem cells. The population of pluripotent stem cells may be cultured in vitro under various culture conditions necessary to support growth, for example, at an appropriate temperature (e.g., 37° C.) and atmosphere (e.g., air plus 5% CO₂) and in an appropriate culture medium. Culture medium may be liquid or semi-solid, e.g. containing agar, methylcellulose, etc. Illustrative examples of cell culture media include Minimal Essential Media (MEM), Iscove's modified DMEM, RPMI 1640Clicks, AIM-V, F-12, X-Vivo 15, X-Vivo 20, and Optimizer, with added amino acids, sodium pyruvate, and vitamins, either serum-free or supplemented with an appropriate amount of serum (or plasma) or a defined set of hormones, and/or an amount of cytokine(s) sufficient for the growth and expansion of the pluripotent stem cells.

[0216] Culture media may be supplemented with one or more factors necessary for proliferation and viability including, but not limited to, growth factors such as serum (e.g., fetal bovine or human serum at about 5%-10%), interleukin-2 (IL-2), insulin, IFN-7, IL-4, IL-7, IL-21, GM-CSF, IL-10, IL-12, IL-15, TGFβ, and TNF-α. Illustrative examples of other additives for T cell expansion include, but are not limited to, surfactant, piasmanate, pH buffers such as HEPES, and reducing agents such as N-acetyl-cysteine and 2-mercaptoethanol, or any other additives suitable for the growth of cells known to the skilled artisan such as L-glutamine, a thiol, particularly 2-mercaptoethanol, and/or antibiotics, e.g. penicillin and streptomycin. Typically, antibiotics are included only in experimental cultures, not in cultures of cells that are to be infused into a subject.

[0217] In some embodiments, the population of pluripotent stem cells is obtained from a sample derived from a subject. In some embodiments, a population of pluripotent stem cells is obtained is obtained from a first subject and the population of modified pluripotent stem cells produced by the methods described herein is administered to a second, different subject. In some embodiments, a population of pluripotent stem cells is obtained from a subject and the population of modified pluripotent stem cells produced by the methods described herein is administered to the same subject. In some embodiments, the sample is a tissue sample, a fluid sample, a cell sample, a protein sample, or a DNA or RNA sample. In some embodiments, a tissue sample may be derived from any tissue type including, but not limited to skin, hair (including roots), bone marrow, bone, muscle, salivary gland, esophagus, stomach, small intestine (e.g., tissue from the duodenum, jejunum, or ileum), large intestine, liver, gallbladder, pancreas, lung, kidney, bladder, uterus, ovary, vagina, placenta, testes, thyroid, adrenal gland, cardiac tissue, thymus, spleen, lymph node, spinal cord, brain, eye, ear, tongue, cartilage, white adipose tissue, or brown adipose tissue. In some embodiments, a tissue sample may be derived from a cancerous, pre-cancerous, or non-cancerous tumor. In some embodiments, a fluid sample comprises buccal swabs, blood, plasma, oral mucous, vaginal mucous, peripheral blood, cord blood, saliva, semen, urine, ascites fluid, pleural fluid, spinal fluid, pulmonary lavage, tears, sweat, semen, seminal fluid, seminal plasma, prostatic fluid, pre-ejaculatory fluid (Cowper's fluid), excreta, cerebrospinal fluid, lymph, cell culture media comprising one or more populations of cells, buffered solutions comprising one or more populations of cells, and the like.

[0218] In some embodiments, the sample is processed to enrich or isolate a population of pluripotent stem cells from the remainder of the sample. In certain embodiments, the sample is a peripheral blood sample which is then subject to leukapheresis to separate the red blood cells and platelets and to isolate lymphocytes. In some embodiments, the sample is a leukopak from which pluripotent stem cells can be isolated or enriched. In some embodiments, the sample is a tumor sample that is further processed to isolate lymphocytes present in the tumor (i.e., by fragmentation and enzymatic digestion of the tumor to obtain a cell suspension of tumor infiltrating lymphocytes).

[0219] In some embodiments, a method for manufacturing modified stems cells contemplated herein comprises activating a population of cells comprising stem cells. In particular embodiments, the stems cells comprise totipotent, pluripotent, multipotent, oligopotent, and unipotent.

[0220] In some embodiments, a method for manufacturing modified pluripotent stems cells contemplated herein comprises activating a population of cells comprising pluripotent stem cells. In particular embodiments, the pluripotent stems cells comprise embryonic stem cells (ESCs), induced pluripotent stem cells (iPSCs), epiblast stem cells (EpiSCs), embryonic germ cells (EGCs), and nuclear transfer embryonic stem cells (ntESCs).

[0221] Provided herein are methods of producing an isolated population of cells comprising human pluripotent stem cell-derived nociceptive neurons (hPSC-NNs) expressing CD200^{low} with altered expression of KCNQ2, TRPV1, or SCN9A. In some embodiments, the cells are contacted with a composition for base editing KCNQ2 mutations, wherein the composition comprises a system comprising a base editor and a gRNA targeting KCNQ2.

[0222] In some embodiments, the base editor comprises ABE8e, ABE8e(V106W), ABE9, ABE20, ABE7.10, SaKKHABE8e, SauriCas9-ABE8e, CjCas9-ABE8e, Nme2Cas9-ABE8e, or SaCas9-ABE8e. In some embodiments, the cells are contacted with a composition for silencing expression of TRPV1 and SCN9A, wherein the composition comprises a system comprising a Cas9 endonuclease and a gRNA targeting TRPV1 and SCN9A.

### Producing Modified Pluripotent Stems Cells Using CRISPR/Cas9 Systems

[0223] In some embodiments, a method of producing a modified stem cell involves contacting a target DNA sequence with a complex comprising a gRNA and a Cas polypeptide. In some embodiments, a method of producing a modified stem cell involves contacting a target DNA sequence with a complex comprising a gRNA and a Cas polypeptide. As discussed above, a gRNA and Cas polypeptide form a complex, wherein the DNA-binding domain of the gRNA targets the complex to a target DNA sequence and wherein the Cas protein (or heterologous protein fused to an enzymatically inactive Cas protein) modifies target DNA sequence. In some embodiments, this complex is formed intracellularly after introduction of the gRNA and Cas protein (or polynucleotides encoding the gRNA and Cas proteins) to a cell. In some embodiments, the nucleic acid encoding the Cas protein is a DNA nucleic acid and is introduced to the cell by transduction. In some embodiments, the Cas9 and gRNA components of a CRISPR/Cas gene editing system are encoded by a single polynucleotide molecule. In some embodiments, the polynucleotide encoding the Cas protein and gRNA component are comprised in a viral vector and introduced to the cell by viral transduction. In some embodiments, the Cas9 and gRNA components of a CRISPR/Cas gene editing system are encoded by different polynucleotide molecules. In some embodiments, the polynucleotide encoding the Cas protein is comprised in a first viral vector and the polynucleotide encoding the gRNA is comprised in a second viral vector. In some aspects of this embodiment, the first viral vector is introduced to a cell prior to the second viral vector. In some aspects of this embodiment, the second viral vector is introduced to a cell prior to the first viral vector. In such embodiments, integration of the vectors results in sustained expression of the Cas9 and gRNA components. However, sustained expression of Cas9 may lead to increased off-target mutations and cutting in some cell types. Therefore, in some embodiments, an mRNA nucleic acid sequence encoding the Cas protein may be introduced to the population of cells by transfection. In such embodiments, the expression of Cas9 will decrease over time, and may reduce the number of off target mutations or cutting sites. In some embodiments, the gRNA and Cas protein are introduced separately by electroporation.

[0224] In some embodiments, this complex is formed in a cell-free system by mixing the gRNA molecules and Cas proteins together and incubating for a period of time sufficient to allow complex formation. This pre-formed complex, comprising the gRNA and Cas protein and referred to herein as a CRISPR-ribonucleoprotein (CRISPR-RNP) can then be introduced to a cell in order to modify a target DNA sequence. In some embodiments, the CRISPR-RNP is introduced to the cell by electroporation.

[0225] In any of the above described embodiments for producing a modified pluripotent stem cell using the CRISPR/Cas system, the system may comprise one or more gRNAs targeting a single endogenous target gene, for example to produce a single-edited modified pluripotent stem cell. Alternatively, in any of the above described embodiments for producing a modified pluripotent stem cell using the CRISPR/Cas system, the system may comprise two or more gRNAs targeting two or more endogenous target genes, for example to produce a dual-edited modified pluripotent stem cell.

[0226] Provided herein are methods of editing at least one target gene comprising the compositions described herein. Provided herein are also methods of producing an isolated population of cells, wherein the population of cells, the method comprising contacting the cells with a composition for base editing target gene mutations, wherein the composition comprises a system comprising a base editor and a gRNA targeting at least one gene. In some embodiments, the least one target gene comprises SCN9A, TRPV1, MRGPRX1, or KCNQ2. In some embodiments, the gRNA comprises a sequence comprising at least 80%, at least 85%, at least 90%, at least 95%, at least 99% or 100% identity to any one of SEQ ID NOs: 82-97. In some embodiments, the gRNA comprises a sequence selected from any one of SEQ ID NOs: 82-97. In some embodiments, the gRNA comprises a spacer sequence comprising at least 80%, at least 85%, at least 90%, at least 95%, at least 99% or 100% identity to any one of SEQ ID NOs: 17, 22, 27, 32, 35, 38, 41, 44, 47, 50, 53, 56, or 59-81. In some embodiments, the gRNA comprises a spacer sequence selected from any one of SEQ ID NOs: 17, 22, 27, 32, 35, 38, 41, 44, 47, 50, 53, 56, or 59-81.

[0227] In some embodiments, the base editor comprises ABE8e, ABE8e(V106W), ABE9, ABE20, ABE7.10, SaKKHABE8e, SauriCas9-ABE8e, CjCas9-ABE8e, Nme2Cas9-ABE8e, or SaCas9-ABE8e. In some embodiments, the base editor comprises Cas9 endonuclease. In some embodiments, the Cas9 endonuclease comprises Type II Cas9.

[0228] Provided herein are also methods of editing KCNQ2 mutations comprising the compositions described herein. In some embodiments, KCNQ2 function is restored. In some embodiments, KCNQ2 function is restored. In some embodiments, the KCNQ2 mutations comprises a p.T730A or c.2188A>G mutation.

[0229] Provided herein are methods of editing TRPV1 or SCN9A comprising the compositions described herein. In some embodiments, TRPV1 or SCN9A expression is reduced or eliminated.

[0230] Provided herein are also methods of producing an isolated population of cells comprising human pluripotent stem cell-derived nociceptive sensory neurons (hPSC-NSNs) expressing CD200^{high} with altered expression of KCNQ2, TRPV1, or SCN9A. In some embodiments, the cells are contacted with a composition for base editing KCNQ2 mutations, wherein the composition comprises a system comprising a base editor and a gRNA targeting KCNQ2. In some embodiments, the gRNA comprises a sequence comprising at least 80%, at least 85%, at least 90%, at least 95%, at least 99% or 100% identity to any one of SEQ ID NO: 83. In some embodiments, the gRNA comprises a sequence of SEQ ID NO: 83. In some embodiments, the gRNA comprises a spacer sequence comprising at least 80%, at least 85%, at least 90%, at least 95%, at least 99% or 100% identity to any one of SEQ ID NOs: 32, 35, 38, 41, 44, 47, 50, 53, 56, or 59-81. In some embodiments, the gRNA comprises a spacer sequence selected from any one of SEQ ID NOs: 32, 35, 38, 41, 44, 47, 50, 53, 56, or 59-81. In some embodiments, the base editor comprises ABE8e, ABE8e(V106W), ABE9, ABE20, ABE7.10, SaKKHABE8e, SauriCas9-ABE8e, CjCas9-ABE8e, Nme2Cas9-ABE8e, or SaCas9-ABE8e. In some embodiments, the cells are contacted with a composition for silencing expression of TRPV1 and SCN9A, wherein the composition comprises a system comprising a Cas9 endonuclease and a gRNA targeting TRPV1 and SCN9A. In some embodiments, the gRNA comprises a sequence comprising at least 80%, at least 85%, at least 90%, at least 95%, at least 99% or 100% identity to any one of SEQ ID NO: 86, 89-92, or 97. In some embodiments, the gRNA comprises a sequence of SEQ ID NO: 86, 89-92, or 97. In some embodiments, the gRNA comprises a spacer sequence comprising at least 80%, at least 85%, at least 90%, at least 95%, at least 99% or 100% identity to any one of SEQ ID NOs: 22 or 27. In some embodiments, the gRNA comprises a spacer sequence selected from any one of SEQ ID NOs: 22 or 27. In some embodiments, the Cas9 endonuclease comprises Type II Cas9.

### Compositions and Kits

[0231] The term “composition” as used herein can refer to a formulation of a gene-regulating system or a modified pluripotent stem cell described herein that is capable of being administered or delivered to a subject or cell. Typically, formulations include all physiologically acceptable compositions including derivatives and/or prodrugs, solvates, stereoisomers, racemates, or tautomers thereof with any physiologically acceptable carriers, diluents, and/or excipients. A “therapeutic composition” or “pharmaceutical composition” (used interchangeably herein) is a composition of a gene-regulating system or a modified pluripotent stem cell capable of being administered to a subject for the treatment of a particular disease or disorder or contacted with a cell for modification of one or more endogenous target genes.

[0232] The phrase “pharmaceutically acceptable” is employed herein to refer to those compounds, materials, compositions, and/or dosage forms which are, within the scope of sound medical judgment, suitable for use in contact with the tissues of human beings and animals without excessive toxicity, irritation, allergic response, or other problem or complication, commensurate with a reasonable benefit/risk ratio.

[0233] As used herein “pharmaceutically acceptable carrier, diluent or excipient” includes without limitation any adjuvant, carrier, excipient, glidant, sweetening agent, diluent, preservative, dye/colorant, flavor enhancer, surfactant, wetting agent, dispersing agent, suspending agent, stabilizer, isotonic agent, solvent, surfactant, and/or emulsifier which has been approved by the United States Food and Drug Administration as being acceptable for use in humans and/or domestic animals. Exemplary pharmaceutically acceptable carriers include, but are not limited to, to sugars, such as lactose, glucose and sucrose; starches, such as corn starch and potato starch; cellulose, and its derivatives, such as sodium carboxymethyl cellulose, ethyl cellulose and cellulose acetate; tragacanth; malt; gelatin; talc; cocoa butter, waxes, animal and vegetable fats, paraffins, silicones, bentonites, silicic acid, zinc oxide; oils, such as peanut oil, cottonseed oil, safflower oil, sesame oil, olive oil, corn oil and soybean oil; glycols, such as propylene glycol; polyols, such as glycerin, sorbitol, mannitol and polyethylene glycol; esters, such as ethyl oleate and ethyl laurate; agar; buffering agents, such as magnesium hydroxide and aluminum hydroxide; alginic acid; pyrogen-free water; isotonic saline; Ringer's solution; ethyl alcohol; phosphate buffer solutions; and any other compatible substances employed in pharmaceutical formulations. Except insofar as any conventional media and/or agent is incompatible with the agents of the present disclosure, its use in therapeutic compositions is contemplated. Supplementary active ingredients also can be incorporated into the compositions.

[0234] “Pharmaceutically acceptable salt” includes both acid and base addition salts. Pharmaceutically-acceptable salts include the acid addition salts (formed with the free amino groups of the protein) and which are formed with inorganic acids such as, for example, hydrochloric acid, hydrobromic acid, sulfuric acid, nitric acid, phosphoric acid and the like, and organic acids such as, but not limited to, acetic acid, 2,2-dichloroacetic acid, adipic acid, alginic acid, ascorbic acid, aspartic acid, benzenesulfonic acid, benzoic acid, 4-acetamidobenzoic acid, camphoric acid, camphor-10-sulfonic acid, capric acid, caproic acid, caprylic acid, carbonic acid, cinnamic acid, citric acid, cyclamic acid, dodecylsulfuric acid, ethane-1,2-disulfonic acid, ethanesulfonic acid, 2-hydroxyethanesulfonic acid, formic acid, fumaric acid, galactaric acid, gentisic acid, glucoheptonic acid, gluconic acid, glucuronic acid, glutamic acid, glutaric acid, 2-oxo-glutaric acid, glycerophosphoric acid, glycolic acid, hippuric acid, isobutyric acid, lactic acid, lactobionic acid, lauric acid, maleic acid, malic acid, malonic acid, mandelic acid, methanesulfonic acid, mucic acid, naphthalene-1,5-disulfonic acid, naphthalene-2-sulfonic acid, 1-hydroxy-2-naphthoic acid, nicotinic acid, oleic acid, orotic acid, oxalic acid, palmitic acid, pamoic acid, propionic acid, pyroglutamic acid, pyruvic acid, salicylic acid, 4-aminosalicylic acid, sebacic acid, stearic acid, succinic acid, tartaric acid, thiocyanic acid, ptoluenesulfonic acid, trifluoroacetic acid, undecylenic acid, and the like. Salts formed with the free carboxyl groups can also be derived from inorganic bases such as, for example, sodium, potassium, lithium, ammonium, calcium, magnesium, iron, zinc, copper, manganese, aluminum salts and the like. Salts derived from organic bases include, but are not limited to, salts of primary, secondary, and tertiary amines, substituted amines including naturally occurring substituted amines, cyclic amines and basic ion exchange resins, such as ammonia, isopropylamine, trimethylamine, diethylamine, triethylamine, tripropylamine, diethanolamine, ethanolamine, deanol, 2-dimethylaminoethanol, 2-diethylaminoethanol, dicyclohexylamine, lysine, arginine, histidine, caffeine, procaine, hydrabamine, choline, betaine, benethamine, benzathine, ethylenediamine, glucosamine, methylglucamine, theobromine, triethanolamine, tromethamine, purines, piperazine, piperidine, N-ethylpiperidine, polyamine resins and the like. Particularly preferred organic bases are isopropylamine, diethylamine, ethanolamine, trimethylamine, dicyclohexylamine, choline and caffeine.

[0235] Wetting agents, emulsifiers and lubricants, such as sodium lauryl sulfate and magnesium stearate, as well as coloring agents, release agents, coating agents, sweetening, flavoring and perfuming agents, preservatives and antioxidants can also be present in the compositions.

[0236] Examples of pharmaceutically-acceptable antioxidants include: (1) water soluble antioxidants, such as ascorbic acid, cysteine hydrochloride, sodium bisulfate, sodium metabisulfite, sodium sulfite and the like; (2) oil-soluble antioxidants, such as ascorbyl palmitate, butylated hydroxyanisole (BHA), butylated hydroxytoluene (BHT), lecithin, propyl gallate, alpha-tocopherol, and the like; and (3) metal chelating agents, such as citric acid, ethylenediamine tetraacetic acid (EDTA), sorbitol, tartaric acid, phosphoric acid, and the like.

[0237] In some embodiments, the present disclosure provides kits for carrying out a method described herein. In some embodiments, a kit can include: one or more nucleic acid molecules capable of reducing the expression or modifying the function of a gene product encoded by one or more endogenous target genes; one or more polynucleotides encoding a nucleic acid molecule that is capable of reducing the expression or modifying the function of a gene product encoded by one or more endogenous target genes; one or more proteins capable of reducing the expression or modifying the function of a gene product encoded by one or more endogenous target genes; one or more polynucleotides encoding a modifying protein that is capable of reducing the expression or modifying the function of a gene product encoded by one or more endogenous target genes; one or more gRNAs capable of binding to a target DNA sequence in an endogenous gene; one or more polynucleotides encoding one or more gRNAs capable of binding to a target DNA sequence in an endogenous gene; one or more site-directed modifying polypeptides capable of interacting with a gRNA and modifying a target DNA sequence in an endogenous gene; one or more polynucleotides encoding a site-directed modifying polypeptide capable of interacting with a gRNA and modifying a target DNA sequence in an endogenous gene; one or more guide DNAs (gDNAs) capable of binding to a target DNA sequence in an endogenous gene; one or more polynucleotides encoding one or more gDNAs capable of binding to a target DNA sequence in an endogenous gene; one or more site-directed modifying polypeptides capable of interacting with a gDNA and modifying a target DNA sequence in an endogenous gene; one or more polynucleotides encoding a site-directed modifying polypeptide capable of interacting with a gDNA and modifying a target DNA sequence in an endogenous gene; one or more gRNAs capable of binding to a target mRNA sequence encoded by an endogenous gene; one or more polynucleotides encoding one or more gRNAs capable of binding to a target mRNA sequence encoded by an endogenous gene; one or more site-directed modifying polypeptides capable of interacting with a gRNA and modifying a target mRNA sequence encoded by an endogenous gene; one or more polynucleotides encoding a site-directed modifying polypeptide capable of interacting with a gRNA and modifying a target mRNA sequence encoded by an endogenous gene; a modified pluripotent stem cell described herein; or any combination of the above.

[0238] In some embodiments, the kits described herein further comprise a population of pluripotent stem cells. In some embodiments, the kits described herein further comprise a population of human pluripotent stem cells. In some embodiments, the kits described herein further comprise a population of human pluripotent stem cells. In some embodiments, the kits described herein further comprise a population of human pluripotent stem cells sensory neurons. In some embodiments, the kits described herein comprise human pluripotent stem cell-derived nociceptive neurons (PSC-NNs). In some embodiments, the kits described herein comprise PSC-NNs expressing CD200^{high}. In some embodiments, the kits described herein comprise hPSC-NNs expressing CD200^{high}.

[0239] In addition to above-mentioned components, in some embodiments a kit further comprises instructions for using the components of the kit to practice the methods of the present disclosure. The instructions for practicing the methods are generally recorded on a suitable recording medium. For example, the instructions may be printed on a substrate, such as paper or plastic, etc. As such, the instructions may be present in the kits as a package insert or in the labeling of the container of the kit or components thereof (i.e., associated with the packaging or sub-packaging). In other embodiments, the instructions are present as an electronic storage data file present on a suitable computer readable storage medium, e.g. CD-ROM, diskette, flash drive, etc. In yet other embodiments, the actual instructions are not present in the kit, but means for obtaining the instructions from a remote source, e.g. via the internet, are provided. An example of this embodiment is a kit that includes a web address where the instructions can be viewed and/or from which the instructions can be downloaded. As with the instructions, this means for obtaining the instructions is recorded on a suitable substrate.

[0240] In some embodiments, the compositions described herein comprises an isolated population of cells comprising human pluripotent stem cell-derived nociceptive neurons (hPSC-NNs) expressing CD200^{high}. In some embodiments, at least 40%, at least 45%, at least 50%, at least 55%, at least 60%, at least 65%, at least 70%, at least 75%, at least 80%, at least 85%, at least 90%, at least 95%, at least 99% or 100% of the cells are CD200^{high} In some embodiments, the cells further express TRPV1, SCN9A, or MRGPRX1.

[0241] In some embodiments, the compositions described herein are for base editing KCNQ2 mutations. In some embodiments, the composition comprises a system comprising a base editor and a gRNA targeting KCNQ2. In some embodiments, the composition comprises a system comprising a base editor and a gRNA targeting SEQ ID NO: 10. In some embodiments, the composition is for silencing expression of TRPV1, SCN9A, and MRGPRX1. In some embodiments, the composition comprises a system comprising a Cas9 endonuclease and a gRNA targeting TRPV1 and SCN9A. In some embodiments, the composition comprises a system comprising a Cas9 endonuclease and a gRNA targeting SEQ ID NO: 1, 3 or 4.

[0242] Provided herein are compositions for base editing gene mutations, wherein the composition comprises a base editor and a guide RNA (gRNA) targeting at least one gene, wherein the at least one target gene comprises SCN9A, TRPV1, MRGPRX1, or KCNQ2. In some embodiments, the gRNA comprises a sequence comprising at least 80%, at least 85%, at least 90%, at least 95%, at least 99% or 100% identity to any one of SEQ ID NOs: 82-97. In some embodiments, the gRNA comprises a sequence selected from any one of SEQ ID NOs: 82-97. In some embodiments, the gRNA comprises a spacer sequence comprising at least 80%, at least 85%, at least 90%, at least 95%, at least 99% or 100% identity to any one of SEQ ID NOs: 17, 22, 27, 32, 35, 41, 44, 47, 50, 53, 56, or 59-81. In some embodiments, the gRNA comprises a spacer sequence selected from any one of SEQ ID NOs: 17, 22, 27, 32, 35, 41, 44, 47, 50, 53, 56, or 59-81.

[0243] In some embodiments, the base editor comprises ABE8e, ABE8e(V106W), ABE9, ABE20, ABE7.10, SaKKHABE8e, SauriCas9-ABE8e, CjCas9-ABE8e, Nme2Cas9-ABE8e, or SaCas9-ABE8e. In some embodiments, base editor comprises Cas9 endonuclease. In some embodiments, the Cas9 endonuclease comprises Type II Cas9.

[0244] Provided herein is also a composition for base editing KCNQ2 mutations, wherein the composition comprises a system comprising a base editor and a gRNA targeting KCNQ2. In some embodiments, the gRNA comprises a sequence comprising at least 80%, at least 85%, at least 90%, at least 95%, at least 99% or 100% identity to of SEQ ID NO: 83. In some embodiments, the gRNA comprises a sequence of SEQ ID NO: 83. In some embodiments, the gRNA comprises a spacer sequence comprising at least 80%, at least 85%, at least 90%, at least 95%, at least 99% or 100% identity to any one of SEQ ID NOs: 32, 35, 38, 41, 44, 47, 50, 53, 56, or 59-81. In some embodiments, the gRNA comprises a spacer sequence selected from any one of SEQ ID NOs: 32, 35, 38, 41, 44, 47, 50, 53, 56, or 59-81. In some embodiments, the base editor comprises ABE8e, ABE8e(V106W), ABE9, ABE20, ABE7.10, SaKKHABE8e, SauriCas9-ABE8e, CjCas9-ABE8e, Nme2Cas9-ABE8e, or SaCas9-ABE8e.

[0245] Provided herein is a composition for silencing expression of TRPV1 and SCN9A, wherein the composition comprises a system comprising a Cas9 endonuclease and a gRNA targeting TRPV1 and SCN9A. In some embodiments, the gRNA comprises a sequence at least 80%, at least 85%, at least 90%, at least 95%, at least 99% or 100% identity to SEQ ID NO: 86, 89-92, or 97. In some embodiments, the gRNA comprises a sequence of SEQ ID NO: 86, 89-92, or 97. In some embodiments, the gRNA comprises a spacer sequence at least 80%, at least 85%, at least 90%, at least 95%, at least 99% or 100% identity to any one of SEQ ID NOs: 22 or 27. In some embodiments, the gRNA comprises a spacer sequence selected from any one of SEQ ID NOs: 22 or 27. In some embodiments, the Cas9 endonuclease comprises Type II Cas9.

[0246] Provided herein are also pharmaceutical compositions or cell stocks comprising the various compositions of the disclosure.

### Therapeutic Methods

[0247] Provided herein are also therapeutic methods comprising the various pluripotent stem cells of the disclosure. In some embodiments, the pluripotent stem cells are unmodified. In some embodiments, pluripotent stem cells highly express CD200. In some embodiments, the pluripotent stem cells are modified pluripotent stem cells. The modified pluripotent stem cells and gene-regulating systems described herein may be used in a variety of therapeutic applications. For example, in some embodiments the modified pluripotent stem cells and/or gene-regulating systems described herein may be administered to a subject for purposes such as gene therapy, e.g. to treat a disease, pain, itching, or for biological research.

[0248] Provided herein are also methods of treating pain in a subject thereof, wherein the method comprises administering an isolated population of cells. In some embodiments, the isolated population of cells comprises pluripotent stem cells. In some embodiments, the pluripotent stem cells are human pluripotent stem cells. In some embodiments, the pluripotent stem cells highly express CD200. In some embodiments, the method of treating pain in a subject thereof comprises administering an isolated population of cells to a joint of the subject. In some embodiments, the joint of the subject is a knee joint. In some embodiments, the method of treating pain in a subject thereof comprises administering an isolated population of cells comprising pluripotent stem cell-derived nociceptive neurons expressing CD200^{high} to a joint of the subject.

[0249] Provided herein are also methods of treating osteoarthritis or a related condition in a subject thereof, wherein the method comprises administering an isolated population of cells. In some embodiments, the isolated population of cells comprises pluripotent stem cells. In some embodiments, the pluripotent stem cells are human pluripotent stem cells. In some embodiments, the pluripotent stem cells highly express CD200. In some embodiments, the method of treating osteoarthritis or a related condition in a subject thereof comprises administering an isolated population of cells to a joint of the subject. In some embodiments, the joint of the subject is a knee joint. In some embodiments, the method of treating osteoarthritis or a related condition in a subject thereof comprises administering an isolated population of cells comprising pluripotent stem cell-derived nociceptive neurons expressing CD200^{low} to a joint of the subject.

[0250] Provided herein are also methods of promoting healing of injured tissues in a subject thereof, wherein the method comprises administering an isolated population of cells. In some embodiments, the isolated population of cells comprises pluripotent stem cells. In some embodiments, the pluripotent stem cells are human pluripotent stem cells. In some embodiments, the pluripotent stem cells highly express CD200. In some embodiments, the method of promoting healing of injured tissues condition in a subject thereof comprises administering an isolated population of cells to a joint of the subject. In some embodiments, the joint of the subject is a knee joint. In some embodiments, the method of promoting healing of injured tissues in a subject thereof comprises administering an isolated population of cells comprising pluripotent stem cell-derived nociceptive neurons expressing CD200^{high} to a joint of the subject.

[0251] In some embodiments, the subject may be a neonate, a juvenile, or an adult. Of particular interest are mammalian subjects. Mammalian species that may be treated with the present methods include canines and felines; equines; bovines; ovines; etc. and primates, particularly humans. Animal models, particularly small mammals (e.g. mice, rats, guinea pigs, hamsters, rabbits, etc.) may be used for experimental investigations.

[0252] Administration of the pluripotent stem cells described herein, populations thereof, and compositions thereof can occur by injection, irrigation, inhalation, consumption, electro-osmosis, hemodialysis, iontophoresis, and other methods known in the art. In some embodiments, administration route is local or systemic. In some embodiments, administration route is intraarterial, intracranial, intradermal, intraduodenal, intramammary, intrameningeal, intraperitoneal, intrathecal, intratumoral, intravenous, intravitreal, ophthalmic, parenteral, spinal, subcutaneous, ureteral, urethral, vaginal, intraarticular, or intrauterine. In some embodiments, the administration route is intraarticular. In some embodiments, the administration is an intraarticular injection. In some embodiments, the administration is an intraarticular injection into a joint. In some embodiments, the joint comprises temporomandibular joint (jaw), shoulder (glenohumeral), elbow, wrist (radiocarpal), hip, knee, and ankle joints. In some embodiments, the joint comprises a knee joint.

[0253] In some embodiments, the administration route is by infusion (e.g., continuous or bolus). Examples of methods for local administration, that is, delivery to the site of injury or disease, include through an Ommaya reservoir, e.g. for intrathecal delivery (See e.g., U.S. Pat. Nos. 5,222,982 and 5,385,582, incorporated herein by reference); by bolus injection, e.g. by a syringe, e.g. into a joint; by continuous infusion, e.g. by cannulation, such as with convection (See e.g., US Patent Application Publication No. 2007-0254842, incorporated herein by reference); or by implanting a device upon which the cells have been reversibly affixed (see e.g. US Patent Application Publication Nos. 2008-0081064 and 2009-0196903, incorporated herein by reference). In some embodiments, the administration route is by topical administration or direct injection. In some embodiments, the modified pluripotent cells described herein may be provided to the subject alone or with a suitable substrate or matrix, e.g. to support their growth and/or organization in the tissue to which they are being transplanted.

[0254] In some embodiments, at least 1×10³ cells are administered to a subject. In some embodiments, at least 5×10³ cells, 1×10⁴ cells, 5×10⁴ cells, 1×10⁵ cells, 5×10⁵ cells, 1×10⁶, 2×10⁶, 3×10⁶, 4×10⁶, 5×10⁶, 1×10⁷, 1×10⁸, 5×10⁸, 1×10⁹, 5×10⁹, 1×10¹⁰, 5×10¹⁰, 1×10¹¹, 5×10¹¹, 1×10¹², 5×10¹², or more cells are administered to a subject. In some embodiments, between about 1×10⁷ and about 1×10¹² cells are administered to a subject. In some embodiments, between about 1×10⁸ and about 1×10¹² cells are administered to a subject. In some embodiments, between about 1×10⁹ and about 1×10¹² cells are administered to a subject. In some embodiments, between about 1×10¹⁰ and about 1×10¹² cells are administered to a subject. In some embodiments, between about 1×10¹¹ and about 1×10¹² cells are administered to a subject. In some embodiments, between about 1×10⁷ and about 1×10¹¹ cells are administered to a subject. In some embodiments, between about 1×10⁷ and about 1×10¹⁰ cells are administered to a subject. In some embodiments, between about 1×10⁷ and about 1×10⁹ cells are administered to a subject. In some embodiments, between about 1×10⁷ and about 1×10⁸ cells are administered to a subject. The number of administrations of treatment to a subject may vary. In some embodiments, introducing the modified pluripotent stem cells into the subject may be a one-time event. In some embodiments, such treatment may require an on-going series of repeated treatments. In some embodiments, multiple administrations of the pluripotent stem cells may be required before an effect is observed. The exact protocols depend upon the disease or condition, the stage of the disease and parameters of the individual subject being treated.

[0255] In some embodiments, the gene-regulating systems described herein are employed to modify cellular DNA or RNA in vivo, such as for gene therapy or for biological research. In such embodiments, a gene-regulating system may be administered directly to the subject, such as by the methods described supra. In some embodiments, the gene-regulating systems described herein are employed for the ex vivo or in vitro modification of a population of pluripotent stem cells. In such embodiments, the gene-regulating systems described herein are administered to a sample comprising pluripotent stem cells.

[0256] In some embodiments, the pluripotent stem cells described herein are administered to a subject. In some embodiments, the pluripotent stems cells described herein are administered to a subject are autologous pluripotent stem cells. The term “autologous” in this context refers to cells that have been derived from the same subject to which they are administered. For example, pluripotent stem cells may be obtained from a subject, modified ex vivo according to the methods described herein, and then administered to the same subject in order to treat a disease. In such embodiments, the cells administered to the subject are autologous pluripotent stem cells. In some embodiments, the modified pluripotent stem cells, or compositions thereof, administered to a subject are allogenic pluripotent stems cells. The term “allogenic” in this context refers to cells that have been derived from one subject and are administered to another subject. For example, pluripotent stem cells may be obtained from a first subject, modified ex vivo according to the methods described herein and then administered to a second subject in order to treat a disease. In such embodiments, the cells administered to the subject are allogenic pluripotent stem cells.

[0257] In some embodiments, the pluripotent stem cells described herein are administered to a subject in order to treat a disease. In some embodiments, treatment comprises delivering an effective amount of a population of cells (e.g., a population of modified pluripotent stem cells) or composition thereof to a subject in need thereof. In some embodiments, treating refers to the treatment of a disease in a mammal, e.g., in a human, including (a) inhibiting the disease, i.e., arresting disease development or preventing disease progression; (b) relieving the disease, i.e., causing regression of the disease state or relieving one or more symptoms of the disease; and (c) curing the disease, i.e., remission of one or more disease symptoms. In some embodiments, treatment may refer to a short-term (e.g., temporary and/or acute) and/or a long-term (e.g., sustained) reduction in one or more disease symptoms. In some embodiments, treatment results in an improvement or remediation of the symptoms of the disease. The improvement is an observable or measurable improvement, or may be an improvement in the general feeling of well-being of the subject.

[0258] The effective amount of a pluripotent stem cell population administered to a particular subject will depend on a variety of factors, several of which will differ from patient to patient including the disorder being treated and the severity of the disorder; activity of the specific agent(s) employed; the age, body weight, general health, sex and diet of the patient; the timing of administration, route of administration; the duration of the treatment; drugs used in combination; the judgment of the prescribing physician; and like factors known in the medical arts.

[0259] In some embodiments, the subject is administered an effective amount of a population of pluripotent stem cells to treat pain. In some embodiments, pain comprises acute pain, chronic pain, nociceptive pain (e.g., somatic or visceral), neuropathic pain, inflammatory pain, and functional or psychogenic pain. In some embodiments, the treated subject exhibits a reduction in pain by at least about 10%, at least about 20%, at least about 30%, at least about 40%, at least about 50%, at least about 60%, at least about 70%, at least about 80%, at least about 90%, or 100% in comparison to the subject prior to treatment or an untreated subject. In some embodiments, the treated subject exhibits at least 1, 2, 3, 4, 5, 6, 7, 8, 9, 10, 20, 30, 40, 50, 60, 70, 80, 90, 100, or more fold decrease in pain in comparison to the subject prior to treatment or an untreated subject.

[0260] In some embodiments, the subject is administered an effective amount of a population of pluripotent stem cells to treat or prevent osteoarthritis. In some embodiments, osteoarthritis comprises primary or secondary osteoarthritis. In some embodiments, the osteoarthritis comprises knee, hip, hand, spine, shoulder, or temporomandibular osteoarthritis. In some embodiments, osteoarthritis is localized, generalized or erosive.

[0261] In some embodiments, the subject is administered an effective amount of a population of pluripotent stem cells to reduce symptoms related to osteoarthritis. In some embodiments, the symptoms comprise joint pain, stiffness, swelling, reduced range of motion, joint tenderness, gating or cracking sensation, bone spurs, or a combination thereof. In some embodiments, the treated subject exhibits a reduction in symptoms associated with osteoarthritis by at least about 10%, at least about 20%, at least about 30%, at least about 40%, at least about 50%, at least about 60%, at least about 70%, at least about 80%, at least about 90%, or 100% in comparison to the subject prior to treatment or an untreated subject. In some embodiments, the treated subject exhibits at least 1, 2, 3, 4, 5, 6, 7, 8, 9, 10, 20, 30, 40, 50, 60, 70, 80, 90, 100, or more fold decrease in symptoms associated with osteoarthritis in comparison to the subject prior to treatment or an untreated subject.

[0262] In some embodiments, the administration of the pluripotent stem cells to a subject reduced the release of pro-inflammatory mediators. In some embodiments, the pluripotent stem cells administered modulate the neuro-immune axis. In some embodiments, the treated subject exhibits a reduction in release of pro-inflammatory immune mediators by at least about 10%, at least about 20%, at least about 30%, at least about 40%, at least about 50%, at least about 60%, at least about 70%, at least about 80%, at least about 90%, or 100% in comparison to the subject prior to treatment or an untreated subject. In some embodiments, the treated subject exhibits at least 1, 2, 3, 4, 5, 6, 7, 8, 9, 10, 20, 30, 40, 50, 60, 70, 80, 90, 100, or more fold decrease in pro-inflammatory mediators in comparison to the subject prior to treatment or an untreated subject.

[0263] In some embodiments, the subject is administered an effective amount of a population of pluripotent stem cells to improve bone and cartilage repair. In some embodiments, the treated subject exhibits an increased bone and cartilage tissue repair by at least about 10%, at least about 20%, at least about 30%, at least about 40%, at least about 50%, at least about 60%, at least about 70%, at least about 80%, at least about 90%, or 100% in comparison to the subject prior to treatment or an untreated subject. In some embodiments, the treated subject exhibits at least 1, 2, 3, 4, 5, 6, 7, 8, 9, 10, 20, 30, 40, 50, 60, 70, 80, 90, 100, or more fold increase in bone and cartilage repair in comparison to the subject prior to treatment or an untreated subject.

[0264] In some embodiments, the treated subject exhibits a reduction in mechanical hypersensitivity by at least about 10%, at least about 20%, at least about 30%, at least about 40%, at least about 50%, at least about 60%, at least about 70%, at least about 80%, at least about 90%, or 100% in comparison to the subject prior to treatment or an untreated subject.

[0265] In some embodiments, the treated subject exhibits a reduction in expression of matrix metalloproteinase 13 (MMP13) by at least about 10%, at least about 20%, at least about 30%, at least about 40%, at least about 50%, at least about 60%, at least about 70%, at least about 80%, at least about 90%, or 100% in comparison to the subject prior to treatment or an untreated subject.

[0266] In some embodiments, the pluripotent stem and gene-regulating systems described herein may be used in the treatment of pain, osteoarthritis or osteoarthritis related conditions.

[0267] Certain embodiments may provide, for example, a composition for or method of treating a subject, comprising: administering a gene editing composition to the subject. In certain embodiments, for example, the administering may comprise injecting the gene editing composition into the subject. In certain embodiments, for example, the injecting may be intrathecal administration. In certain embodiments, for example, the injecting may be injecting the gene editing composition into a location identified as a location exhibiting pain (or proximate to such location) in the subject. In certain embodiments, for example, the administering may comprise administering to a joint of the subject. In certain embodiments, for example, the joint may be a knee joint.

[0268] In certain embodiments, for example, the gene editing composition may comprise a KCNQ2 gene editor. In certain embodiments, for example, the gene editing composition may comprise a SCN9A gene editor. In certain embodiments, for example, the gene editing composition may comprise a MRGPRX1 gene editor. In certain embodiments, for example, the gene editing composition may comprise a TRPV1 gene editor.

[0269] In certain embodiments, for example, the method may be associated with a measure of reduction in pain. In certain embodiments, for example, the reduction in pain may be a reduction of at least or about 5%, 10%, 10%, 15%, 20%, 25%, 30%, 35%, 40%, 50%, 60%, 70%, 80%, 90%, 95%, or 100% or any ranges within such percentages. In certain embodiments, for example, the reduction in the measure of pain may be a reduction in the range of between 5% and 90%, for example the reduction may be in the range of between 10% and 75%, in the range of between 10% and 50%, in the range of between 10% and 25%, in the range of between 25% and 75%, in the range of between 25% and 50%, or the reduction in the measure of pain may be a reduction in the range of between 30% and 60%.

[0270] In certain embodiments, for example, the measure of reduction in pain may be a measure of pain in the treated subject (for example a pain score such as a verbal or written subjective pain score). In certain embodiments, for example, the measure of reduction in pain may be based at least on a measurement taken after treatment compared to a measurement taken prior to treatment. In certain embodiments, for example, the measure of reduction in pain may be based on a trend of at least three measurements. In certain embodiments, for example, the measure of reduction in pain may be a result of an animal study (for example a study in humans, a study in mice, etc.). In certain embodiments, for example, the measure of reduction in pain may be based on a comparison between a group having a condition that receives the gene editing composition and a control group that does not have the condition. In certain embodiments, for example, the measure of reduction in pain may be based on a comparison between a group having a condition that receives the gene editing composition and a control group that receives a nontargeted gene editing composition.

[0271] In certain embodiments, for example, the measure of reduction in pain may comprise a Rotarod test. In certain embodiments, for example, the measure of reduction in pain may comprise a Hargreaves test. In certain embodiments, for example, the measure of reduction in pain may comprise a Von Frey test. In certain embodiments, for example, the measure of reduction in pain may comprise one or more electrophysiology measurements.

[0272] In certain embodiments, for example, the composition and/or method may be associated with a change in a measure of itch. In certain embodiments, for example, the change in the measure of itch may be a change of less than or about 30%, 25, 20, 15, 10, 5, 2, or 1% relative to control. In certain embodiments, for example, the change in the measure of itch may be a statistically insignificant change compared to control.

[0273] In certain embodiments, for example, the measure of itch may be a measure of itch in the treated subject (for example a verbal or written subjective score). In certain embodiments, for example, the measure of itch may be based at least on a measurement taken after treatment compared to a measurement taken prior to treatment. In certain embodiments, for example, the measure of itch may be based on a trend of at least three measurements. In certain embodiments, for example, the measure of itch may be a result of an animal study (for example a study in humans, a study in mice, etc.). In certain embodiments, for example, the measure of itch may be based on a comparison between a group having a condition that receives the gene editing composition and a control group that does not have the condition. In certain embodiments, for example, the measure of itch may be based on a comparison between a group having a condition that receives the gene editing composition and a control group that receives a nontargeted gene editing composition.

[0274] In certain embodiments, for example, the measure of itch may comprise measurement of itch-like biting. In certain embodiments, for example, the measure of itch may comprise measurement of BAM8-22 induced itch-like biting.

[0275] In certain embodiments, for example, the subject may be a human. In certain embodiments, for example, the subject may be a domesticated animal. In certain embodiments, for example, the domesticated animal may be a pet. In certain embodiments, for example, the, domesticated animal may be a working animal. In certain embodiments, for example, the domesticated animal may be a dog. In certain embodiments, for example, the domesticated animal may be a cat. In certain embodiments, for example, the animal may be a feral cat (for example a barn cat). In certain embodiments, for example, the domesticated animal may be livestock. In certain embodiments, for example, the livestock may be a cow. In certain embodiments, for example, the livestock may be a sheep. In certain embodiments, for example, the livestock may be a goat. In certain embodiments, for example, the livestock may be a pig. In certain embodiments, for example, the livestock may be a chicken. In certain embodiments, for example, the livestock may be a horse.

[0276] In certain embodiments, for example, the pain may comprise chronic pain. In certain embodiments, for example, the pain may comprise nociceptive pain. In certain embodiments, for example, the pain may comprise pruriceptive pain.

[0277] Certain embodiments may provide, for example, compositions for and methods of treating a subject to reduce pain while minimizing a change in itch sensation comprising: administering a gene editing composition to the subject. In certain embodiments, for example, the subject may exhibit at least a 10% reduction in pain and less than a 10% change in itch, for example the subject may exhibit at least a 20% reduction in pain and less than a 10% change in itch, at least a 30% reduction in pain and less than a 10% change in itch, at least a 50% reduction in pain and less than a 10% change in itch, at least a 25% reduction in pain and less than a 5% change in itch, or the subject may exhibit at least a 15% reduction in pain and less than a 5% change in itch.

### NUMBERED EMBODIMENTS

[0278] Notwithstanding the appended claims, the disclosure sets forth the following numbered embodiments:

[0279] Embodiment 1. A method of producing a population of mature human pluripotent stem cell-derived sensory neurons (hPSC-SNs) expressing a target gene associated with at least one of nociceptive pain, chronic pain, pruriception and a nociceptive- or pruriceptive-mediated condition, the method comprising: introducing into a population of human pluripotent stem cells (hPSCs) a composition comprising: at least one site-directed nuclease targeting a site within the target gene, and at least one nucleic acid comprising a nucleotide sequence encoding at least one screenable, selectable marker that is flanked by (i) a nucleotide sequence homologous with a region located upstream of the target site within the target gene and (ii) a nucleotide sequence homologous with a region located downstream of the target site within the target gene, wherein the target site is located downstream of the open reading frame of the target gene, and wherein the site-directed nuclease cleaves the target site of the target gene and the nucleic acid encoding the screenable, selectable marker is inserted at the target site; covering said population of hPSCs under an extracellular matrix comprising at least one neuronal differentiation driver to produce a sensory committed neural crest population; contacting said sensory committed neural crest population with at least one neuronal differentiation driver and at least one neurotrophic factor to produce a population of early sensory neurons (SNs); and contacting said population of early SNs with at least one neurotrophic factor to produce a population of mature hPSC-SNs expressing at least one of SN marker or one pan neuronal marker; isolating the cells expressing the at least one screenable, selectable marker, wherein said population of mature hPSC-SNs expressed said one target gene associated with nociceptive pain, chronic pain, pruriception a nociceptive- or pruriceptive-mediated condition, and wherein said population of mature hPSC-SNs responds to a nociceptive and pruriceptive stimulus.

[0280] Embodiment 2. The method of embodiment 1, wherein the target gene is SCN9A, TRPV1, MRGPRX1, or KCNQ2.

[0281] Embodiment 3. The method of embodiment 2, wherein the site-directed nuclease is a CRISPR system comprising a ribonuclear protein (RNP) comprising CRISPR nuclease complexed with a guide RNA (gRNA) or a single guide RNA (sgRNA).

[0282] Embodiment 4. The method of embodiment 1 or 2, wherein CRISPR nuclease is a Type II Cas9 nuclease or a Type V Cfpl nuclease, and the CRISPR nuclease is linked to at least one nuclear localization signal.

[0283] Embodiment 5. The method according to any one of embodiments 1 to 4, wherein the at least one screenable, selectable marker is a fluorescent reporting protein, an antibiotic resistance protein, or a combination thereof.

[0284] Embodiment 6. The method according to embodiment 5, wherein the fluorescent reporting protein is selected from green fluorescent protein (GFP), yellow fluorescent protein (YFP), red fluorescent protein (RFP), lacZ, firefly Rennila protein, luciferase, red cyan protein, and yellow cyan protein.

[0285] Embodiment 7. The method of embodiment 6, wherein the fluorescent reporting protein is selected from green fluorescent protein (GFP).

[0286] Embodiment 8. The method of embodiment 5, wherein the antibiotic resistance protein is selected from hygromycin, neomycin, zeocin, and puromycin.

[0287] Embodiment 9. The method of embodiment 8, wherein the antibiotic resistance protein is puromycin.

[0288] Embodiment 10. The method according to any one of embodiments 2 to 9, wherein the target gene is SEQ ID NO: 1, the nucleic acid encoding the at least one screenable, selectable marker comprises SEQ ID NO: 2, and the gRNA comprises a spacer sequence corresponding to a target sequence consisting of SEQ ID NO: 1

[0289] Embodiment 11. The method according to any one of embodiments 2 to 9, wherein the target gene is SEQ ID NO: 3, the nucleic acid encoding the at least one screenable, selectable marker comprises SEQ ID NO: 2, and the gRNA comprises a spacer sequence corresponding to a target sequence consisting of SEQ ID NO: 3.

[0290] Embodiment 12. The method of embodiment 10, wherein the hPSC-SNs are enriched in voltage gated potassium channel genes, active transporter genes, GPCR receptors, or any combination thereof.

[0291] Embodiment 13. The method of embodiment 11, wherein the hPSC-SNs are enriched in voltage gated potassium channel genes, active transporter genes, GPCR receptors, or any combination thereof.

[0292] Embodiment 14. The method of embodiments 12 to 13, wherein the voltage gated potassium channel genes comprise KCNQ2 and KCNG2.

[0293] Embodiment 15. The method according to embodiment 12 to 13, wherein the active transporter genes comprise SLC10A4 and ATP2B4.

[0294] Embodiment 16. The method according to embodiment 12 to 13, wherein the GPCR receptors comprise ADCYAP1R1.

[0295] Embodiment 17. The method according to any one of embodiments 2 to 9, wherein the target gene is SEQ ID NO: 4, the nucleic acid encoding the at least one screenable, selectable marker comprises SEQ ID NO: 2, and the gRNA comprises a spacer sequence corresponding to a target sequence consisting of SEQ ID NO: 4.

[0296] Embodiment 18. The method according to embodiment 17, wherein hPSC-SNs are enriched in voltage gated calcium channel genes, GPCR receptors, or any combination thereof.

[0297] Embodiment 19. The method according to embodiment 18, wherein the voltage gated calcium channel genes comprise CACNG1, CACNA1S, CACNG8, and CACNA2D3.

[0298] Embodiment 20. The method according to embodiment 18, wherein the GPCR receptors comprise PRNP, DNM3, UTS2R, HTR2C, HTR1E, HTR2A HTR1D, and NPY1R.

[0299] Embodiment 21. The method according to any one of embodiments 1 to 20 wherein the composition further comprises at least one agent capable of favoring the homology-directed repair (HDR) pathway over the non-homologous end-joining (NHEJ) pathway.

[0300] Embodiment 22. The method according to embodiment 21, wherein the agent is an HDR activator or NHEJ inhibitor.

[0301] Embodiment 23. The method according to embodiment 21, wherein the HDR activator is selected from the group comprising: RAD51, RAD52, DMC 1, CtIP, or any combination thereof.

[0302] Embodiment 24. The method according to embodiment 21, wherein the NHEJ inhibitor selected from E1B55K, E4orf6, 53BP1(DM), Rif, p53, or any combination thereof.

[0303] Embodiment 25. A population of hPSC-SNs produced by the method according to any one of embodiments 1-24.

[0304] Embodiment 26. The method of embodiment 1, wherein the target gene is associated with nociceptive pain.

[0305] Embodiment 27. The method of embodiment 1, wherein the target gene is associated with chronic pain.

[0306] Embodiment 28. A population of hPSC-SNs produced by the method according to any one of embodiments 25-27.

[0307] Embodiment 29. A method of altering the expression or function of at least one target gene associated with nociceptive pain, chronic pain, pruriception and a nociceptive/pruriceptive condition in a sensory neuron (SN), the method comprising: introducing into SN a composition comprising: at least one site-directed nuclease targeting a site within the target gene, and optionally, at least one nucleic acid comprising a nucleotide sequence encoding a gene expression altering sequence that is flanked by (i) a nucleotide sequence homologous with a region located upstream of the target site within the target gene and (ii) a nucleotide sequence homologous with a region located downstream of the target site within the target gene, and wherein the site-directed nuclease cleaves the target site of the target gene and the nucleic acid encoding the gene expression altering sequence is inserted at the target site; wherein the expression or function of said at least one target gene is altered.

[0308] Embodiment 30. The method of embodiment 29, wherein the site-directed nuclease is a CRISPR system comprising a ribonuclear protein comprising CRISPR nuclease complexed with a guide RNA (gRNA) or a single guide RNA (sgRNA).

[0309] Embodiment 31. The method of embodiment 30, wherein CRISPR nuclease is a Type II Cas9 nuclease or a Type V Cfpl nuclease, and the CRISPR nuclease is linked to at least one nuclear localization signal.

[0310] Embodiment 32. The method of embodiment 29, wherein the composition is a vector composition comprising: (a) a polynucleotide sequence encoding a type of Cas9 protein variant or a fusion protein comprising at least one variant from of Cas9 protein; (b) a polynucleotide sequence encoding at least one guide RNA (gRNA) or a single guide RNA (sgRNA); (c) one or more promoters, each promoter operably linked to the polynucleotide sequence encoding the at least one gRNA and the polynucleotide sequence encoding the Cas9 protein or fusion protein; (d) optionally, a polynucleotide sequence encoding at least one gene expression altering sequence that is flanked by (i) a nucleotide sequence homologous with a region located upstream of the target site within the target gene and (ii) a nucleotide sequence homologous with a region located downstream of the target site within the target gene.

[0311] Embodiment 33. The method of embodiment 32, wherein variants of Cas9 protein comprise SpCas9, SaCas9.

[0312] Embodiment 34. The method of embodiment 32, wherein the vector is a viral vector.

[0313] Embodiment 35. The method according to embodiment 34, wherein the viral vector is an Adeno-associated virus (AAV) vector.

[0314] Embodiment 36. The method of embodiment 35, wherein the AAV vector is an AAV8 vector, an AAV1 vector, an AAV6.2 vector, an AAVrh74 vector, an AAV9 vector, or an AAV PUP.s.

[0315] Embodiment 37. The method according to any one of embodiments 32-36 wherein the vector composition comprises a single vector comprising: (a) a polynucleotide sequence encoding a variant from the class of Cas9 proteins or a fusion protein comprising a variant from the class of Cas9 proteins; (b) a polynucleotide sequence encoding at least one guide RNA (gRNA) or a single guide RNA (sgRNA); (c) one or more promoters, each promoter operably linked to the polynucleotide sequence encoding the at least one gRNA and the polynucleotide sequence encoding the Cas9 protein or fusion protein; (d) optionally, a polynucleotide sequence encoding at least one gene expression altering sequence that is flanked by (i) a nucleotide sequence homologous with a region located upstream of the target site within the target gene and (ii) a nucleotide sequence homologous with a region located downstream of the target site within the target gene.

[0316] Embodiment 38. The method of any one of embodiments 32-37, wherein the vector composition comprises two or more vectors comprising (a) a polynucleotide sequence encoding a type of Cas9 variant protein n or a fusion protein comprising the Cas9 protein; (b) a polynucleotide sequence encoding at least one guide RNA (gRNA) or a single guide RNA (sgRNA); (c) one or more promoters, each promoter operably linked to the polynucleotide sequence encoding the at least one gRNA and the polynucleotide sequence encoding the Cas9 protein or fusion protein; (d) optionally, a polynucleotide sequence encoding at least one gene expression altering sequence that is flanked by (i) a nucleotide sequence homologous with a region located upstream of the target site within the target gene and (ii) a nucleotide sequence homologous with a region located downstream of the target site within the target gene.

[0317] Embodiment 39. The method of any one of embodiments 32-37, wherein the vector composition comprises: a first vector comprising (i) a polynucleotide sequence encoding a type of Cas9 protein variant or a fusion protein comprising the variant of Cas9 protein; and (ii) a promoter operably linked to the polynucleotide sequence encoding the variant of Cas9 protein or a fusion protein comprising the variant of Cas9 protein a second vector comprising (i) a polynucleotide sequence encoding at least one guide RNA (gRNA) or a single guide RNA (sgRNA); (ii) a promoter operably linked to the polynucleotide sequence encoding the at least one guide RNA (gRNA) or a single guide RNA (sgRNA) and, optionally, (iii) a polynucleotide sequence encoding at least one gene expression altering sequence that is flanked by (a) a nucleotide sequence homologous with a region located upstream of the target site within the target gene and (b) a nucleotide sequence homologous with a region located downstream of the target site within the target gene.

[0318] Embodiment 40. The method according to any one of embodiments 1-39, wherein the dual AAV-mediated delivery comprises TRPV1 sgRNA and SaCas9, consisting of SEQ ID NOs: 5, 6, and 7.

[0319] Embodiment 41. The method according to any one of embodiments 1-40, wherein the dual AAV-mediated delivery comprises SCN9A sgRNA and SaCas9, consisting of SEQ ID NOs: 5, 8, and 9.

[0320] Embodiment 42. The method according to any one of embodiments 29-39, wherein the expression of the target gene is inhibited.

[0321] Embodiment 43. The method according to any one of embodiments 29-42, wherein the target gene is from SCN9A, TRPV1, MRGPRX1, KCNQ2 or any combination thereof.

[0322] Embodiment 44. The method according to any one of embodiments 29-42, wherein the target gene is SCN9A and the gRNA comprises a spacer sequence corresponding to a target sequence consisting of SEQ ID NO: 1.

[0323] Embodiment 45. The method according to any one of embodiments 25-43, wherein the target gene is TRPV1 and the gRNA comprises a spacer sequence corresponding to a target sequence consisting of SEQ ID NO.3.

[0324] Embodiment 46. The method according to any one of embodiments 25-43, wherein the target gene is KCNQ2, the nucleic acid encoding the gene expression altering sequence comprising SEQ ID NO: 10, and the gRNA comprises a spacer sequence corresponding to a target sequence consisting of SEQ ID NO: 10.

[0325] Embodiment 47. The method of embodiment 46, wherein KCNQ2 function is altered by introducing the mutation c.2188A>G, p.Thr730Ala set forth in SEQ ID NO: 10.

[0326] Embodiment 48. The method of embodiments 46 or 47, wherein the composition administered to SN further comprises a second gRNA comprising a spacer sequence corresponding to a target sequence consisting of SEQ ID NO: 10.

[0327] Embodiment 49. The method according to embodiment 48, wherein KCNQ2 function is altered by introducing a CAC (histidine) to CGC (arginine) mutation.

[0328] Embodiment 50. The method according to any one of embodiments 46-49, wherein the composition administered to SN further comprises at least one nucleic acid comprising a nucleotide sequence encoding a base editor operably linked to a promoter, wherein the base editor comprises a nucleic acid programmable DNA binding protein (napDNAbp) domain and a deaminase domain.

[0329] Embodiment 51. The method of embodiment 50, wherein the base editor further comprises one or more nuclear localization sequences (NLS).

[0330] Embodiment 52. The method of embodiment 50 or 51, wherein the base editor is ABE8e, ABE8e(V106W), ABE9, ABE20, ABE7.10, or a variant thereof.

[0331] Embodiment 53. The method according to any one of embodiments 50-52, wherein the base editor is SaKKH-ABE8e, SauriCas9-ABE8e, CjCas9-ABE8e, Nme2Cas9-ABE8e, or SaCas9-ABE8e, or a variant thereof.

[0332] Embodiment 54. The method according to any one of embodiments 50-53, wherein the base editor is SauriCas9-ABE8e.

[0333] Embodiment 55. The method according to any one of embodiments 29-54, wherein the sensory neurons expressing mutation have diminished and protracted Ca²⁺ response to KC1 stimulation as compared to neurons expressing wild type KCNQ2.

[0334] Embodiment 56. The method according to any one of embodiments 29-55, wherein the sensory neurons is produced according to the method of embodiment 1.

[0335] Embodiment 57. The method according to any one of embodiments 29-55, wherein the sensory neurons is produced according to the method of embodiments 29 or 30.

[0336] Embodiment 58. A population of sensory neurons produced by the method according to any one of embodiments 29-57.

[0337] Embodiment 59. A method of producing an enriched population of mature human pluripotent stem cell-derived nociceptive sensory neurons (hPSC-NSNs) expressing CD200 gene (CD200+), the method comprising: contacting hPSC-NSNs produced by the method of embodiment 1 with a CD200-specific antibody; and separating the antibody-bound cells from the non-bound cells in order to obtain the purified cells.

[0338] Embodiment 60. The method according to embodiment 59, wherein the CD200-specific antibody is OX-104.

[0339] Embodiment 61. The method of embodiment 59, wherein the separation step is carried out by means of MACS or FACS.

[0340] Embodiment 62. The method according to embodiment 61, wherein the separation step is carried out by means of FACS.

[0341] Embodiment 63. The method according to any one of embodiments 59-62, wherein the enriched CD200+ hPSC-NSNs population is also expresses MiR-24 miRNA.

[0342] Embodiment 64. A method of treating nociceptive pain, chronic pain, pruriception and a nociceptive- or pruriceptive-mediated condition in a subject in need thereof, the method comprising administering to a subject the population of sensory neurons having the function of KCNQ2 altered according to methods of any one of embodiments 46-54 into a subject.

[0343] Embodiment 65. A method of treating nociceptive pain, chronic pain, pruriception and a nociceptive- or pruriceptive-mediated condition in a subject in need thereof, the method comprising administering to a subject the population of CD200+ sensory neurons of any one of embodiments 59-64.

[0344] Embodiment 66. The method according to embodiments 64 or 65, wherein the administering is by implanting the population of sensory neurons onto one or more affected locations of the subject.

[0345] Embodiment 67. The method according to embodiment 59, wherein the population of sensory neurons is implanted at the one or more sites of nociceptive pain and chronic pain.

[0346] Embodiment 68. The method according to any one of embodiments 64-67, wherein the population of sensory neurons is autologous to the subject.

[0347] Embodiment 69. The method according to any one of embodiments 64-67, wherein the population of sensory neurons is allogeneic to the subject.

[0348] Embodiment 70. The method according to any one of embodiments 64-69, wherein the nociceptive, chronic, and pruriceptive condition is osteoarthritis.

[0349] Embodiment 71. The method according to any one of embodiments 64-69, wherein the nociceptive, chronic, pruriceptive condition is derived from neuroinflammation or neurodegeneration, or a combination thereof.

[0350] Embodiment 72. The method according to any one of embodiments 1-39, wherein the dual AAV-mediated delivery comprises KCNQ2, consisting of SEQ ID NOs: 11, 12, and 13.

[0351] Embodiment 73. The method according to any one of embodiments 1-39, wherein the dual AAV-mediated delivery comprises KCNQ2, consisting of SEQ ID NOs: 14, 15, and 16.

[0352] Embodiment 74. A method for screening for a drug candidate that modulates one or more MRGPRX1, TRPV1 or SCN9A-mediated conditions the method comprising: contacting at least one population of hPSC-SNs expressing one of MRGPRX1, TRPV1 or SCN9A produced according to any one of embodiments 1-24 with a drug candidate; and detecting a response to a nociceptive and pruriceptive stimulus in said at least one population of hPSC-SNs expressing one of MRGPRX1, TRPV1 or SCN9A to thereby select said drug candidate for modulating said response.

[0353] Embodiment 75 relates to an isolated population of cells comprising pluripotent stem cell-derived sensory neurons (PSC-SNs) expressing at least one sensory neuron or pan neuronal marker.

[0354] Embodiment 76 includes the cells of embodiment 75, wherein the PSC-SNs respond to a nociceptive and pruriceptive stimulus.

[0355] Embodiment 77 includes the cells of embodiment 75 or 76, comprising cells expressing TRPV1, SCN9A, MRGPRX1, or KCNQ2.

[0356] Embodiment 78 includes the cells of any one of embodiments 75-77, comprising cells expressing CD200^{high}.

[0357] Embodiment 79 includes the cells of embodiment 78, wherein at least 40%, at least 45%, at least 50%, at least 55%, at least 60%, at least 65%, at least 70%, at least 75%, at least 80%, at least 85%, at least 90%, at least 95%, at least 99%, or 100% of the cells express CD200^{high}.

[0358] Embodiment 80 includes the cells of any one of embodiments 75-79, comprising PSC-SNs derived from an animal or a human (hPSC-SNs).

[0359] Embodiment 81 includes the cells of any one of embodiments 75-80, wherein the PSC-SNs comprise pluripotent stem cell-derived nociceptive sensory neurons (PSC-NSNs).

[0360] Embodiment 82 relates to a composition comprising the cells of any one of embodiments 75-81, and at least one excipient.

[0361] Embodiment 83 relates to a method of treating pain or osteoarthritis, and/or promoting healing of injured tissues in a subject thereof, wherein the method comprises administering the cells of any one of embodiments 75-81 to the subject.

[0362] Embodiment 84 includes the method of embodiment 83, wherein the method comprises administering to a joint of the subject.

[0363] Embodiment 85 includes the method of embodiment 84, wherein the joint is a knee joint.

[0364] Embodiment 86 includes the method of any one of embodiments 83-85, wherein the pain comprises chronic pain, nociceptive pain, or pruriceptive pain.

[0365] Embodiment 87 includes the method of any one of embodiments 83-86, wherein the cells are administered to the subject at multiple intervals.

[0366] Embodiment 88 includes the method of any one of embodiments 83-87, wherein the subject is an animal or human.

[0367] Embodiment 89 includes the method of any one of embodiments 83-88, wherein the treated subject exhibits a reduction in pain by at least about 10%, at least about 20%, at least about 30%, at least about 40%, at least about 50%, at least about 60%, at least about 70%, at least about 80%, at least about 90%, or 100% in comparison to the subject prior to treatment or an untreated subject.

[0368] Embodiment 90 includes the method of any one of embodiments 83-89, wherein the treated subject exhibits a reduction in mechanical hypersensitivity by at least about 10%, at least about 20%, at least about 30%, at least about 40%, at least about 50%, at least about 60%, at least about 70%, at least about 80%, at least about 90%, or 100% in comparison to the subject prior to treatment or an untreated subject.

[0369] Embodiment 91 includes the method of any one of embodiments 83-90, wherein the treated subject exhibits a reduction in expression of matrix metalloproteinase 13 (MMP13) by at least about 10%, at least about 20%, at least about 30%, at least about 40%, at least about 50%, at least about 60%, at least about 70%, at least about 80%, at least about 90%, or 100% in comparison to the subject prior to treatment or an untreated subject.

[0370] Embodiment 92 relates to a composition for base editing target gene mutations, wherein the composition comprises a base editor and a guide RNA (gRNA) targeting at least one gene, wherein the at least one target gene comprises SCN9A, TRPV1, MRGPRX1, or KCNQ2.

[0371] Embodiment 93 includes the composition of embodiment 92, wherein the gRNA comprises a sequence selected from any one of SEQ ID NOs: 82-97.

[0372] Embodiment 94 includes the composition of embodiment 92, wherein the gRNA comprises a spacer sequence selected from any one of SEQ ID NOs: 17, 22, 27, 32, 35, 38, 41, 44, 47, 50, 53, 56, or 59-81.

[0373] Embodiment 95 includes the composition of any one of embodiments 92-94, wherein the base editor comprises ABE8e, ABE8e(V106W), ABE9, ABE20, ABE7.10, SaKKHABE8e, SauriCas9-ABE8e, CjCas9-ABE8e, Nme2Cas9-ABE8e, or SaCas9-ABE8e.

[0374] Embodiment 96 includes the composition of any one of embodiments 92-94, wherein the base editor comprises Cas9 endonuclease.

[0375] Embodiment 97 includes the composition of embodiment 96, wherein the Cas9 endonuclease comprises Type II Cas9.

[0376] Embodiment 98 relates to a method of editing at least one target gene comprising the composition of any one of embodiments 92-97.

[0377] Embodiment 99 relates to a method of producing an isolated population of cells, wherein the population of cells comprises cells of any one of embodiments 75-81, the method comprising contacting the cells with a composition for base editing target gene mutations, wherein the composition comprises a system comprising a base editor and a gRNA targeting at least one gene.

[0378] Embodiment 100 includes the method of embodiment 99, wherein the cells have altered expression of the at least one target gene.

[0379] Embodiment 101 includes the method of embodiment 99 or 100, wherein the least one target gene comprises SCN9A, TRPV1, MRGPRX1, or KCNQ2.

[0380] Embodiment 102 includes the method of any one of embodiments 99-101, wherein the gRNA comprises a sequence selected from any one of SEQ ID NOs: 82-97.

[0381] Embodiment 103 includes the method of embodiment 99-101, wherein the gRNA comprises a spacer sequence selected from any one of SEQ ID NOs: 17, 22, 27, 32, 35, 38, 41, 44, 47, 50, 53, 56, or 59-81.

[0382] Embodiment 104 includes the method of any one of embodiments 99-103, wherein the base editor comprises ABE8e, ABE8e(V106W), ABE9, ABE20, ABE7.10, SaKKHABE8e, SauriCas9-ABE8e, CjCas9-ABE8e, Nme2Cas9-ABE8e, or SaCas9-ABE8e.

[0383] Embodiment 105 includes the method of any one of embodiments 99-103, wherein the base editor comprises Cas9 endonuclease.

[0384] Embodiment 106 includes the method of embodiment 105, wherein the Cas9 endonuclease comprises Type II Cas9.

[0385] Embodiment 107 relates to a composition for base editing KCNQ2 mutations, wherein the composition comprises a system comprising a base editor and a gRNA targeting KCNQ2.

[0386] Embodiment 108 includes the composition of embodiment 107, wherein the gRNA comprises a sequence of SEQ ID NO: 83.

[0387] Embodiment 109 includes the composition of embodiment 107, wherein the gRNA comprises a spacer sequence selected from any one of SEQ ID NOs: 32, 35, 38, 41, 44, 47, 50, 53, 56, or 59-81.

[0388] Embodiment 110 includes the composition of any one of embodiments 107-109, wherein the base editor comprises ABE8e, ABE8e(V106W), ABE9, ABE20, ABE7.10, SaKKHABE8e, SauriCas9-ABE8e, CjCas9-ABE8e, Nme2Cas9-ABE8e, or SaCas9-ABE8e.

[0389] Embodiment 111 relates to a method of editing KCNQ2 mutations comprising the composition of any one of embodiments 107-110.

[0390] Embodiment 112 includes the method of embodiment 111, wherein KCNQ2 function is restored.

[0391] Embodiment 113 includes the method of embodiment 111, wherein the KCNQ2 mutations comprises a p. T730A or c.2188A>G mutation.

[0392] Embodiment 114 relates to a composition for silencing expression of TRPV1 and SCN9A, wherein the composition comprises a system comprising a Cas9 endonuclease and a gRNA targeting TRPV1 and SCN9A.

[0393] Embodiment 115 includes the composition of embodiment 114, wherein the gRNA comprises a sequence selected from any one of SEQ ID NO: 86, 89-92, or 97.

[0394] Embodiment 116 includes the composition of embodiment 114, wherein the gRNA comprises a spacer sequence selected from any one of SEQ ID NOs: 22 or 27.

[0395] Embodiment 117 includes the composition of any one of embodiments 114-116, wherein the Cas9 endonuclease comprises Type II Cas9.

[0396] Embodiment 118 relates to method of editing TRPV1 or SCN9A comprising the composition of any one of embodiments 114-117.

[0397] Embodiment 119 includes the method of embodiment 118, wherein TRPV1 or SCN9A expression is reduced or eliminated.

[0398] Embodiment 120 relates to a method of producing an isolated population of cells comprising human pluripotent stem cell-derived nociceptive sensory neurons (hPSC-NSNs) expressing CD200^{high} with altered expression of KCNQ2, TRPV1, or SCN9A.

[0399] Embodiment 121 includes the method of embodiment 120, wherein the cells are contacted with a composition for base editing KCNQ2 mutations, wherein the composition comprises a system comprising a base editor and a gRNA targeting KCNQ2.

[0400] Embodiment 122 includes the method of embodiment 121, wherein the gRNA comprises a sequence of SEQ ID NO: 83.

[0401] Embodiment 123 includes the method of embodiment 121, wherein the gRNA comprises a spacer sequence selected from any one of SEQ ID NOs: 32, 35, 38, 41, 44, 47, 50, 53, 56, or 59-81.

[0402] Embodiment 124 includes the method of any one of embodiments 121-123, wherein the base editor comprises ABE8e, ABE8e(V106W), ABE9, ABE20, ABE7.10, SaKKHABE8e, SauriCas9-ABE8e, CjCas9-ABE8e, Nme2Cas9-ABE8e, or SaCas9-ABE8e.

[0403] Embodiment 125 includes the method of embodiment 120, wherein the cells are contacted with a composition for silencing expression of TRPV1 and SCN9A, wherein the composition comprises a system comprising a Cas9 endonuclease and a gRNA targeting TRPV1 and SCN9A.

[0404] Embodiment 126 includes the method of embodiment 125, wherein the gRNA comprises a sequence of SEQ ID NO: 86, 89-92, or 97.

[0405] Embodiment 127 includes the method of embodiment 125, wherein the gRNA comprises a spacer sequence selected from any one of SEQ ID NOs: 22 and 27.

[0406] Embodiment 128 includes the method of any one of embodiments 125-127, wherein the Cas9 endonuclease comprises Type II Cas9.

[0407] Embodiment 129 relates to a method of treating a subject, comprising: administering a gene editing composition to the subject.

[0408] Embodiment 130 includes the composition of any one of embodiments 1-129, wherein the administering comprises injecting the gene editing composition into the subject.

[0409] Embodiment 131 includes the composition of any one of embodiments 1-130, wherein the injecting is intrathecal administration.

[0410] Embodiment 132 includes the composition of any one of embodiments 1-131, wherein the injecting is injecting the gene editing composition into a location identified as a location exhibiting pain (or proximate to such location) in the subject.

[0411] Embodiment 133 includes the composition of any one of embodiments 1-132, wherein the administering comprises administering to a joint of the subject.

[0412] Embodiment 134 includes the composition of any one of embodiments 1-133, wherein the join is a knee joint.

[0413] Embodiment 135 includes the composition of any one of embodiments 1-134, wherein the gene editing composition comprises a KCNQ2 gene editor.

[0414] Embodiment 136 includes the composition of any one of embodiments 1-135, wherein the gene editing composition comprises a SCN9A gene editor.

[0415] Embodiment 137 includes the composition of any one of embodiments 1-136, wherein the gene editing composition comprises a MRGPRX1 gene editor.

[0416] Embodiment 138 includes the composition of any one of embodiments 1-137, wherein the gene editing composition comprises a TRPV1 gene editor.

[0417] Embodiment 139 includes the composition of any one of embodiments 1-138, wherein the method is associated with a measure of reduction in pain.

[0418] Embodiment 140 includes the composition of any one of embodiments 1-139, wherein the reduction in pain is a reduction of at least 10%, for example the reduction is at least 20%, the reduction is at least 25%, the reduction is at least 30%, the reduction is at least 30%, the reduction is at least 40%, the reduction is at least 50%, the reduction is at least 60%, the reduction is at least 70%, the reduction is at least 80%, or the reduction in pain is a reduction of at least 90%.

[0419] Embodiment 141 includes the composition of any one of embodiments 1-140, wherein the reduction in the measure of pain is a reduction in the range of between 5% and 90%, for example the reduction is in the range of between 10% and 75%, in the range of between 10% and 50%, in the range of between 10% and 25%, in the range of between 25% and 75%, in the range of between 25% and 50%, or the reduction in the measure of pain is a reduction in the range of between 30% and 60%.

[0420] Embodiment 142 includes the composition of any one of embodiments 1-141, wherein the measure of reduction in pain is a measure of pain in the treated subject (for example a pain score such as a verbal or written subjective pain score).

[0421] Embodiment 143 includes the composition of any one of embodiments 1-142, wherein the measure of reduction in pain is based at least on a measurement taken after treatment compared to a measurement taken prior to treatment.

[0422] Embodiment 144 includes the composition of any one of embodiments 1-143, wherein the measure of reduction in pain is based on a trend of at least three measurements.

[0423] Embodiment 145 includes the composition of any one of embodiments 1-144, wherein the measure of reduction in pain is a result of an animal study (for example a study in humans, a study in mice, etc.).

[0424] Embodiment 146 includes the composition of any one of embodiments 1-145, wherein the measure of reduction in pain is based on a comparison between a group having a condition that receives the gene editing composition and a control group that does not have the condition.

[0425] Embodiment 147 includes the composition of any one of embodiments 1-146, wherein the measure of reduction in pain is based on a comparison between a group having a condition that receives the gene editing composition and a control group that receives a nontargeted gene editing composition.

[0426] Embodiment 148 includes the composition of any one of embodiments 1-147, wherein the measure of reduction in pain comprises a Rotarod test.

[0427] Embodiment 149 includes the composition of any one of embodiments 1-148, wherein the measure of reduction in pain comprises a Hargreaves test.

[0428] Embodiment 150 includes the composition of any one of embodiments 1-149, wherein the measure of reduction in pain comprises a Von Frey test.

[0429] Embodiment 151 includes the composition of any one of embodiments 1-150, wherein the measure of reduction in pain comprises one or more electrophysiology measurements.

[0430] Embodiment 152 includes the composition of any one of embodiments 1-151, wherein the method is associated with a change in a measure of itch.

[0431] Embodiment 153 includes the composition of any one of embodiments 1-152, wherein the change in the measure of itch is a change of less than 30%, for example a change of less than 25%, a change of less than 20%, a change of less than 15%, a change of less than 10%, a change of less than 5%, or the change in the measure of itch is a change of less than 2%.

[0432] Embodiment 154 includes the composition of any one of embodiments 1-153, wherein the change in the measure of itch is a statistically insignificant change.

[0433] Embodiment 155 includes the composition of any one of embodiments 1-154, wherein the measure of itch is a measure of itch in the treated subject (for example a verbal or written subjective score).

[0434] Embodiment 156 includes the composition of any one of embodiments 1-155, wherein the measure of itch is based at least on a measurement taken after treatment compared to a measurement taken prior to treatment.

[0435] Embodiment 157 includes the composition of any one of embodiments 1-156, wherein the measure of itch is based on a trend of at least three measurements.

[0436] Embodiment 158 includes the composition of any one of embodiments 1-157, wherein the measure of itch is a result of an animal study (for example a study in humans, a study in mice, etc.).

[0437] Embodiment 159 includes the composition of any one of embodiments 1-158, wherein the measure of itch is based on a comparison between a group having a condition that receives the gene editing composition and a control group that does not have the condition.

[0438] Embodiment 160 includes the composition of any one of embodiments 1-159, wherein the measure of itch is based on a comparison between a group having a condition that receives the gene editing composition and a control group that receives a nontargeted gene editing composition.

[0439] Embodiment 161 includes the composition of any one of embodiments 1-160, wherein the measure of itch comprises measurement of itch-like biting.

[0440] Embodiment 162 includes the composition of any one of embodiments 1-161, wherein the measure of itch comprises measurement of BAM8-22 induced itch-like biting.

[0441] Embodiment 163 includes the composition of any one of embodiments 1-162, wherein the subject is a human.

[0442] Embodiment 164 includes the composition of any one of embodiments 1-163, wherein the subject is a domesticated animal.

[0443] Embodiment 165 includes the composition of any one of embodiments 1-164, wherein the domesticated animal is a pet.

[0444] Embodiment 166 includes the composition of any one of embodiments 1-165, wherein the domesticated animal is a working animal.

[0445] Embodiment 167 includes the composition of any one of embodiments 1-166, wherein the domesticated animal is a dog.

[0446] Embodiment 168 includes the composition of any one of embodiments 1-167, wherein the domesticated animal is a cat.

[0447] Embodiment 169 includes the composition of any one of embodiments 1-168, wherein the animal is a feral cat (for example a barn cat).

[0448] Embodiment 170 includes the composition of any one of embodiments 1-169, wherein the domesticated animal is livestock.

[0449] Embodiment 171 includes the composition of any one of embodiments 1-170, wherein the livestock is a cow.

[0450] Embodiment 172 includes the composition of any one of embodiments 1-171, wherein the livestock is a sheep.

[0451] Embodiment 173 includes the composition of any one of embodiments 1-172, wherein the livestock is a goat.

[0452] Embodiment 174 includes the composition of any one of embodiments 1-173, wherein the livestock is a pig.

[0453] Embodiment 175 includes the composition of any one of embodiments 1-174, wherein the livestock is a chicken.

[0454] Embodiment 176 includes the composition of any one of embodiments 1-175, wherein the livestock is a horse.

[0455] Embodiment 177 includes the composition of any one of embodiments 1-176, wherein the pain comprises chronic pain.

[0456] Embodiment 178 includes the composition of any one of embodiments 1-177, wherein the pain comprises nociceptive pain.

[0457] Embodiment 179 includes the composition of any one of embodiments 1-178, wherein the pain comprises pruriceptive pain.

[0458] Embodiment 180 relates to a method of treating a subject to reduce pain while limiting a change in itch, comprising: administering a gene editing composition to the subject.

[0459] Embodiment 181 includes the composition of any one of embodiments 1-180, wherein the subject exhibits at least a 10% reduction in pain and less than a 10% change in itch, for example the subject exhibits at least a 20% reduction in pain and less than a 10% change in itch, at least a 30% reduction in pain and less than a 10% change in itch, at least a 50% reduction in pain and less than a 10% change in itch, at least a 25% reduction in pain and less than a 5% change in itch, or the subject exhibits at least a 15% reduction in pain and less than a 5% change in itch.

### EXAMPLES

### Example 1. Materials and Methods

hPSC Maintenance

[0460] Healthy control hESC (H9, WiCell) were cultured using standard protocols. The hESC line was cultured with mouse embryonic fibroblasts (MEFs) (Gibco) pre-plated at 12,000-15,000 cells/cm². hPSC culture medium contained DMEM/F12, 20% knockout serum replacement, 1 mM L-glutamine, 100 μM MEM non-essential amino acids, and 0.1 mM 2-mercaptoethanol. 10 ng/mL of FGF-2 was added after sterile filtration, and cells were fed daily, and passaged weekly, using 6 U/mL dispase or mechanically.

Generation of Knock-In hPSC Lines

[0461] The feeder-free hPSCs were dissociated into single cells using Accutase (Innovative Cell Technologies), and 1.5×10⁶ H9 cells were resuspended in nucleofection solution V (Lonza) with 5 g HDR donor plasmid, 2 g i53 plasmid, 0.5 nmol sgRNA, and 0.5 nmol Cas9 nuclease (V3 or HiFi V3) for TRPV1::GFP, MRGPRX1::GFP and SCN9A::GFP (FIG. 12). The RNP complex for each reporter line was assembled immediately prior to nucleofection. 1.5×106 H9 cells were nucleofected with 5 g HDR donor plasmid, 2 g i53 plasmid, 0.5 nmol sgRNA, and 0.5 nmol Cas9 nuclease (V3 or HiFi V3) using Amaxa Lonza Nucleofector II system. Nucleofection was performed with Nucleofector™ II according to the manufacturer's instruction (using the B-16 program, Lonza). The nucleofected cell suspension was subsequently plated on puromycin resistant MEFs (DR4, Global Stem) in hESC medium with 10 μM Y-27632. Three days after nucleofection, the cells that had undergone homologous recombination were selected by adding 0.5 g/ml of puromycin to hESC medium for two days.

Sensory Neuron Differentiation from hESCs

[0462] hPSCs were dissociated into single cells using TrypLE™, and plated on a 0.1% gelatin-coated dish for 10 minutes to remove MEFs. Non-adherent cells (mostly hPSCs) were collected, and plated on a 1% geltrex-coated dish (1 hour coating), at a density of 4.6×10⁴ cells per well of a 24-well plate, in the presence of filtered MEF-conditioned KSR media containing 10 ng/ml of FGF-2 (R&D systems) and 10 μM of Y-27632 (Cayman Chemical) (day −1). From the next day (day 0) (70% of confluence), to initiate differentiation, the medium was aspirated and KSR medium containing 10 μM SB-431542 and 500 nM LDN-193189 was added. On day 2 the medium was changed to KSR medium containing 10 μM SB-431542 and 500 nM LDN-193189.

[0463] On day 4 medium was changed to KSR/N2 (3:1) medium containing 10 μM SB-431542, 500 nM LDN-193189, and 10 μM DAPT (final concentrations are for the combined KSR/N2 mixture). On day 6, the medium was changed to KSR/N2 (1:1) medium containing 10 μM SB-431542, 500 nM LDN-193189, and 10 μM DAPT. On day 8, the medium was changed to KSR/N2 (1:3) medium containing 10 μM SB-431542, 500 nM LDN-193189, and 10 μM DAPT. On day 10, the medium was changed to N2 medium containing 10 μM SB-431542, 500 nM LDN-193189, and 10 μM DAPT. On day 12, neural crest cells were dissociated into single cells using TrypLE™ and plated on poly-lysine/laminin/fibronectin coated 12-well plates with a density of 2×10⁴-7×10⁴ cells per 5 μl media. 5 drops were added to each well 12-well plates. Cells were incubated in 5 ul droplets for 10 minutes at 37° C. to fully attach. NB media containing 10 ng/ml of FGF-2 and 10 μM of Y-27632 was then gently added to each well through the wall. On day 14, 17, and 20, the medium was changed to NB media containing 200 μM dibutyrl cyclic AMP, 200 μM sodium 1-ascorbate, 20 ng/ml NGF, 10 ng/ml BDNF, 10 ng/ml BDNF and 10 ng/ml NT-3. After day 21 of differentiation, half of the spent medium in each well was gently aspirated and supplemented with fresh NB medium containing 200 μM dibutyrl cyclic AMP, 200 μM sodium 1-ascorbate, 20 ng/ml NGF, and 10 ng/ml GDNF. Media was changed every 3 days. Laminin and fibronectin were added to the media every week to maintain attachment.

### FACS Purification of TRPV1+, SCN9A+, and MRGPRX1+ Neurons

[0464] One day prior to FACS purification, mature hPSC-derived sensory neurons were fed with fresh NB media containing 200 μM dibutyrl cyclic AMP, 200 μM sodium 1-ascorbate, 20 ng/ml NGF, and 10 ng/ml GDNF. On the day of FACS purification, sensory neuron-conditioned media was harvested from each well, filtered, and supplemented with 10 μM of Y-27632 to make post-sorting media (PSM). hPSC-derived sensory neurons were incubated with TrypLE™ for 30 minutes at 37° C. to dissociate into single cells. Pelleted cells were resuspended in FACS media (90% DPBS+10% DMEM with DNasel, 10 μM of Y-27632, and 3% penicillin-streptomycin) and passed through 50 um strainers. 1 μl Sytox Red (ThermoFisher Scientific, S34859) was added per 1 ml cell suspension. Cells were sorted using SH800S Cell Sorter based on GFP fluorescence and collected in 1.5 ml Eppendorf tubes (filled with 400 ul PSM+3% penicillin-streptomycin). Purified TRPV1+, SCN9A+, or MRGPRX1+ cells were pelleted, resuspended in PSM at a density of 1×10⁴ cells per 5 μl, and replated in 48-well plates pre-coated with poly-lysine/laminin/fibronectin. One 5 μl drop was placed per well. Cells were incubated in 5 μl droplets for 10 minutes at 37° C. to fully attach and added with PSM media. Note that 3% penicillin-streptomycin was added to the FACS media and PSM in the collecting tubes but not to the final replating media.

Purification of CD200+ hPSC-Derived Neurons

[0465] One day prior to FACS purification, mature hPSC-derived sensory neurons were fed with fresh NB media containing 200 μM dibutyrl cyclic AMP, 200 μM sodium 1-ascorbate, 20 ng/ml NGF, and 10 ng/ml GDNF. On the day of FACS purification, sensory neuron-conditioned media was harvested from each well, filtered, and supplemented with 10 μM of Y-27632 to make post-sorting media (PSM). hPSC-derived sensory neurons were incubated with TrypLE™ for 30 minutes at 37° C. to dissociate into single cells. Pelleted cells were resuspended in FACS media (90% DPBS+10% DMEM with DNaseI, 10 μM of Y-27632, and 3% penicillin-streptomycin) and passed through 50 um strainers. 1 μl Sytox Red (ThermoFisher Scientific, S34859) was added per 1 ml cell suspension. Mix 10 g of APC/Cy7 Anti-human CD200 antibody *OX-10⁴* (AAT Bioquest, 120001D0) to cells harvested from one plate suspended in 5 mL of FACS media and incubate for 10 min at 37° C.

[0466] Resuspend the cells and transfer to sorting tubes (with 50 um strainer cap) using a p1000 micropipette and store the tube on ice. Sort the cells using SH800S Cell Sorter based on GFP fluorescence (for TRPV1+ or SCN9A+ identity), Sytox red (for live cells) and APC/Cy7 fluorescence (for CD200+ identity) and collected in 1.5 ml Eppendorf tubes (filled with 400 μl PSM+3% penicillin-streptomycin). Purified CD200+ cells were pelleted, resuspended in PSM at a density of 1×10⁴ cells per 5 ul, and replated in 48-well plates pre-coated with polylysine/laminin/fibronectin. One 5 ul drop was placed per well. Cells were incubated in 5 ul droplets for 10 minutes at 37° C. to fully attach and added with PSM media. Note that 3% penicillin-streptomycin was added to the FACS media and PSM in the collecting tubes but not to the final replating media.

### Animals and Surgical Procedure

[0467] Female and male rats (Charles River, SRO rat, strain code: 707) aged about 50 days were used in the study with approval by the JHU IACUC committee (PI: Dong). Prior to surgery, animals were anesthetized with ketamine (2 mg/lb) and kept under anesthesia for the duration of the surgery.

[0468] For transplantation into the DRG, a midline incision was performed through the skin and fascia, and then the surrounding muscles were dissected and retracted laterally to expose the lower lumbar vertebral column. A hemi-laminectomy was performed to expose the spinal cord dura and the attached nerve root and L4 DRG. 0.5 μl cell suspension containing 1×10⁴ TRPV1+ neurons, 2.7×10⁴ SCN9A+ neurons, and 3×10⁴ differentiating neural crest cells were injected into the DRG or the adjacent nerve bundles. Cells were delivered using a glass capillary to minimize physical damage. The glass capillary was left in place for 1 minute to prevent backflow. Grafted animals were maintained and monitored for 4 weeks before left and right L4 DRGs were surgically removed. Left (control) and right L4 DRGs were stained for GFP (Abeam, ab13970) and TUJ1 (ThermoFisher Scientific, MA1-118) to examine the survival of hPSC-derived sensory neurons.

[0469] Male NIH III nude from Charles River Laboratories (Wilmington, MA). Mice were anesthetized at 8 weeks of age with xylazine (Rompun, Sedazine, AnaSed; 10 mg/kg, intraperitoneally) and ketamine (Vetalar, Ketaset, Ketalar; 100 mg/kg, intraperitoneally). Then, the anterior cruciate ligament transection (ACLT) surgery was performed to induce instability of the knee. Sham ACLT operations were performed by opening the joint capsule of the knee of independent mice. The tibial tuberosity of sham or ACLT mice was injected with 40 k cells/knee of CD200+ or CD200-hPSC-SNs 2 weeks after surgery.

### Behavioral Testing

[0470] Behavioral tests were performed 2 weeks after the cell injection and 4 weeks after surgery. All behavioral tests were performed by the same investigators, who were blinded to the allocation of groups. The von Frey hair was applied perpendicular to the plantar surface of the hind paw (avoiding the toe pads) for 2-3 s. If no response was observed, the next higher strength of hair was used, up to the maximum level of 6 g of bending force. If a withdrawal response occurred, the paw was retested, starting with the next descending von Frey hair until no response occurred. Four more measurements were made after the first difference was observed. The 50% PWT was determined by using the following formula:

50% PWT¼10×fpkd=10,000;
[0471] where xf is the exact value (in log units) of the final test of von Frey hair, K is the tabular value for the pattern of the last six positive/negative responses, and d is the mean difference (in log units) between stimuli. The threshold force required to elicit paw withdrawal (median 50% withdrawal) was determined twice on each hind paw (and averaged) on each testing day, with sequential measurements separated by at least 10 min.
   Virus Infection of hPSC-Derived TRPV1+ Neurons

[0472] FACS-purified TRPV1+ neurons were cultured for 7 days before infection using AAV PHP.SCAG-tdTomato (MOI=10,000, 20,000, and 100,000). Ad-NULL (MOI=100) was used to coinfect TRPV1+ neurons for improved infection efficiency and tdTomato overexpression. Infected TRPV1+ cells were cultured for additional 5 days, washed for three times in PSM, and injected into animals.

### Immunohistochemical Analysis

[0473] Culture neurons were fixed with 4% PFA for 1 hours at room temperature. After 2 washes with PBS, the samples were blocked in PBS with 5% Bovine Serum Albumin (BSA) (Sigma Aldrich) and 0.2% Triton X-100 (Sigma Aldrich) for 1 hour at room temperature and incubated with primary antibodies overnight at 4° C. Primary antibodies were washed 3 times with PBS with 0.3% Triton X-100 (PBST). The samples were incubated with secondary antibodies for 1-2 hours at room temperature. After secondary incubation, slides were washed 3 times with PBST and mounted using VECTASHIELD Antifade Mounting Medium with DAPI (Fisher Vector Lab). The staining was performed using primary antibodies such as BRN3a (Abeam, ab245230), TUJ1 (ThermoFisher Scientific, MA1-118) and appropriate 488, 568, and 647-conjugated Alexa fluor secondary antibodies (Invitrogen) were utilized.

### Single Cell Transcriptomics and Pathway Analysis

[0474] R (version 4.3.2) and Seurat (version 5) were used for the single-cell RNA-seq analysis. Sequencing reads were separately acquired for SOX10+, RUNX1+, TRPV1+, SCN9A+ and MRGPRX1+ cells and imported as separate Seurat objects. Data were normalized (NormalizeData) within each group and verified by FeatureScatter (nFeature_RNA vs. nCount_RNA>0.9 for all five groups). Five Seurat objects were then merged into one (merged) with the original identity stored as metadata in each object. ElbowPlot(merged) was performed to calculate the major principle components to avoid over-clustering. To remove technical and other batch-to-batch variations, SCTransform was performed for normalization and variance stabilization of molecular count data from scRNA-seq experiments. Highly similar clusters without clearly distinguishable markers were merged to produce the final 18 clusters. All clusters representing subtypes of mature sensory neurons (i.e., TRPV1+, SCN9A+ and MRGPRX1+) are verified for neuronal markers SNAP25, RBFOX1 and THY1. Standard Seurat analysis pipeline was followed to identify enriched genes in each cluster. Violin plot was used to visualize top genes co-enriched with CD200. Enriched pathways in CD200+ cells were identified using the opensource, open access, manually curated and peer-reviewed Reactome pathway database.

### Statistics

[0475] All data are shown as mean±SEM and were subjected to statistical analysis. Significance was analyzed by 1-way ANOVA using Dunnett's or Tukey's multiple-comparisons test or were analyzed by 2-tailed unpaired Student's t test. P≤0.05 was considered significant. The n values indicate the number of independent biological samples. Data were analyzed and represented with GraphPad Prism.

### Example 2. Isolation and Functional Characterization of Molecularly Defined Subsets of Nociceptive and Pruriceptive hPSC-SNs

[0476] FIGS. 1A-1D illustrate generating hPSC reporter lines. As illustrated, to isolate molecularly defined subsets from hPSC-derived sensory neurons (hPSC-SNs), MRGPRX1::GFP, TRPV1::GFP, and SCN9A::GFP reporter cell lines were generated using the CRISPR-Cas9 system. FIG. 1A illustrate schematic of CRISPR-mediated knock-in construct for MRGPRX1::GFP, TRPV1::GFP, and SCN9A::GFP cell lines. FIG. 1A illustrates a schematic of CRISPR-mediated knock-in construct for MRGPRX1::GFP, TRPV1::GFP, and SCN9A::GFP cell lines. For each locus, the stop codon was replaced with 2A-eGFP-PGK-Puro gene cassette (FIG. 1A). Each clone was separately differentiated into sensory neurons and detected for GFP expression using fluorescence-activated cell sorting (FACS) after 40 DIVs (FIG. 1B) using an optimized protocol (FIG. 1C). The timeline of sensory neuron differentiation protocol is illustrated in FIG. 1C. Representative morphology of hPSC-derived sensory neurons expressing BRN3A (general sensory neuron marker) and TUJI (pan neuronal marker) is illustrated in FIG. 1D. Three clones were confirmed and kept for each line: MRGPRX1::GFP (2A4, 2A8, 2D10), TRPV1::GFP (3B1, 3B4, 3B17), and SCN9A::GFP (3A5, 3A8, 3A19).

[0477] FIGS. 2A-2E illustrate characterizing the transcriptional landscape of MRGPRX1::GFP, SCN9A:: GFP, and TRPV1::GFP sensory neurons. Differentially expressed genes were independently analyzed in each lineage comparison using Gene Set Enrichment Analysis (GSEA) with gene sets from Molecular Signatures Database (MSigDB). To uncover molecular differences among the three subsets of hPSC-SNs, bulk RNA-seq (NextSeq) was performed to identify differentially expressed genes (DEGs) in SCN9A::GFP+ versus SCN9A::GFP−, TRPV1::GFP+ versus TRPV1::GFP−, and MRGPRX1::GFP+ versus MRGPRX1::GFP-hPSC-SNs (70 DIVs). Using gene set enrichment analysis (GSEA), we first analyzed the differential enrichment of membrane receptors and channels (FIG. 2A), as they serve important roles in regulating neuronal excitability and firing rate, making them promising novel therapeutic targets in the treatment of chronic pain. Several voltage-gated potassium channels (e.g., KCNQ2 and KCNG1), active transporters (e.g., SLCJOA4 and ATP2B4), and GPCRs (e.g., ADCYAPIR1) are specifically enriched in TRPV1::GFP+ and SCN9A::GFP+ but not MRGPRX1::GFP+ neurons, suggesting that they play specific roles in the activity or function of nociceptors. On the other hand, some GPCRs (e.g., PRNP, DNM3, UTS2R, HTR2C, HTRJE˜HTR2A, HTRJD, and NPYJR) and voltage-gated calcium channels (e.g., CACNGJ, CACNAJS, CACNG8, and CACNA2D3) are specifically enriched in MRGPRX1::GFP+ but not SCN9A::GFP+ or TRPV1::GFP+ neurons, suggesting for their putative roles in mediating itch. GSEA also reveals differentially regulated pathways and transcription factors in SCN9A::GFP+, TRPV1::GFP+, and MRGPRX1::GFP+ hPSC-SNs (FIG. 2B).

[0478] The differential distributions of enriched membrane receptors and channels in SCN9A::GFP+, TRPV1::GFP+, and MRGPRX1::GFP+ hPSC-SNs highlight transcriptomic differences among the three subsets of sensory neurons (FIG. 2C-2E). MRGPRX1::GFP+ hPSC-SNs show the most diverse receptor expression profile, suggesting that they are comprised of a highly homogeneous population of neurons (FIG. 2E).

[0479] FIGS. 3A-3F illustrate purifiable and excitable populations of hPSC-derived MRGPRX1+, TRPV1+ sensory neurons. To test their functionality, the excitability and purity of sorted MRGPRX1::GFP+, TRPV1::GFP+ cells were examined by their Ca²⁺ transient (Calbryte 590) in response to different pain- and itch-triggering stimuli. MRGPRX1+ neurons displayed significantly heightened response to BAM 8-22 (10 μM) compared to MRGPRX1− neurons (FIG. 3A-3B). Specifically, the purity of sorted MRGPRX1+ and TRPV1+ neurons was tested by quantifying the percentage of activated neurons in response to BAM 8-22 (10 μM) and capsaicin (10 μM) when compared with MRGPRX1− and TRPV1− populations, respectively (FIG. 3A-3F). Specifically, MRGPRX1+ neurons (FIG. 3B) displayed significantly heightened response to BAM 8-22 (10 μM) compared to MRGPRX1− neurons (FIG. 3A) and TRPV1+ neurons (FIG. 3E) displayed significantly heightened response to capsaicin (10 μM) compared to TRPV1-neurons (FIG. 3D).

[0480] FIGS. 4A-4L. illustrate FACS-purified TRPV1+, SCN9A+, and MRGPRX1+ hPSC-derived sensory neurons responding to various pain- and itch-inducing ligands. The polymodality was examined of TRPV1+ (FIGS. 4A-4E), SCN9A+ (FIGS. 4F-4H), and MRGPRX1+ (FIG. 4I-4K) neurons. The TRPV1+ (FIGS. 4A-4E), SCN9A+ (FIGS. 4F-4H), and MRGPRX1+ (FIG. 4I-4K) neurons were characterized by their response profile to BAM 8-22 (10 μM), capsaicin (10 μM), mustard oil (100 μM), menthol (100 μM), histamine (50 μM), and ATP (50 μM). For example, many of TRPV1+ neurons are responding to mustard oil as well as capsaicin (FIG. 4E) whereas very small numbers of TRPV1+ neurons are responding to menthol (FIG. 4C). In FIG. 4L, we summarized the percentages of each neuron that is responding to each stimulus. Our hPSC-derived MRGPRX1+, TRPV1+, and SCN9A+ neurons displayed distinct response profiles with a preferential response to BAM 8-22, capsaicin, and histamine, respectively, while there is distinctive heterogeneity in terms of their polymodal responsiveness to additional stimuli.

[0481] FIGS. 5A-5S. illustrate in vitro optimization and functional validation of candidate CRISPR sgRNAs to enable TRPV1 knockout, and SCN9A knockout. With the goal of developing gene therapy products that provide robust, DRG-specific suppression of chronic pain, we explored the use of CRISPR induced AAV-delivered loss-of-function modulation and silencing (CALMS) to independently target three cation channels in the afferent pain pathway that are vital for the generation of action potentials and the maintenance of resting membrane potential. To establish robust pain silencing in DRG neurons, we first aimed at silencing two major pain targets TRPV1 and SCN9A. We systematically selected 200+ CRISPR sgRNA constructs to enable TRPVJ or SCN9A knockout (FIG. 5A-5Q). Using the most widely used in silica designing tools (CRISPick, CRISPOR. and Cas-Designer), we then selected top 10 candidate sgRNAs targeting early exons of TRPVJ or SCN9A (FIG. 5A, 5K). Three sgRNAs (red) targeting TRPVJ or SCN9A were picked based on three parameters, including high on-target efficiency scores, low off-target effects, and high out-of-frame scores, and were transfected into FACS-purified TRPV1::GFP+ hPSC-SNs (70 DNs) or SCN9A::GFP+ hPSC-SNs (70 DNs) using lipofectamine-mediated delivery.

[0482] Knockout efficiencies of TRPV1-knockout sgRNAs (TRPV1-sgRNAs) and SCN9A-knockout sgRNAs (SCN9A-sgRNAs) were compared using qPCR (FIG. SB, SL). The two most efficient TRPV1-sgRNAs and SCN9A-sgRNAs were packaged into AAV PHP.s (a serotype with a strong DRG neuron-tropism) using a dual-AAV delivery strategy (FIG. SC, SM). FACS-purified TRPV1::GFP+ hPSC-SNs (70 DIVs) or SCN9A::GFP+ hPSC-SNs (70 DIVs) were transduced with two TRPV1-sgRNAs and two SCN9A-sgRNAs, respectively (FIG. 5D, data not shown). We then functionally evaluated the efficiencies of AAV-delivered TRPV1-sgRNAs and SCN9A-sgRNAs by examining their Ca²⁺ transients when exposed to capsaicin (10 μM), histamine (50 μM), mustard oil (100 μM), ATP (50 μM), BAM 8-22 (10 μM), and KCl (50 mM). While ES TRP VJ-sgRNA demonstrated specific silencing effects upon the administration of capsaicin (the primary ligand of TRPV1) (FIG. 5F-5J), El 1 SCN9A-sgRNA displayed robust silencing to all five pain-mediating stimuli and KCl (FIG. 5H-5Q). FIG. SR illustrates schematic representation of using CRISPR-mediated HDR delivered by a dual-AAV system to install a protective c.2188A>G (p.Thr730Ala) mutation in KCNQ2. FIG. 5S illustrates schematic representation of using CRISPR-mediated base editing delivered by a dual-AAV system to install a protective c.2188A>G (p.Thr730Ala) mutation in KCNQ2.

[0483] FIGS. 6A-6I illustrate single cell RNA-seq data and CD200 as a nociceptor marker. TRKA antibody has been used as the gold standard to isolate nociceptive neurons from heterogenous peripheral neuronal cultures despite the apparent limitation that TRKA is expressed in some non-nociceptive neurons and many nociceptors don't express TRKA (Fang et al., 2005; Saito-Diaz et al., 2021). Discovering a novel non-genetic, antibody-based approach to purify nociceptive neurons from heterogeneous cultures is an important step towards testing the in vitro efficacy of gene therapy strategies in a more generalized context. To this end, we identified top enriched CD markers in TRPV1+ vs. TRPV1−, SCN9A+ vs. SCN9A−, and MRGPRX1+ vs. MRGPRX1− cells, in which CD200 was shown to be significantly enriched in both SCN9A+ and TRPV1+ (but not MRGPRX1+) populations (FIG. 6A). Published human DRG scRNA-seq data also demonstrates that CD200 is specifically enriched in small-fiber primary afferents and clusters differently from NEFH+ large diameter neurons (FIG. 6B, figure generated from raw sequencing data from Tavares-Ferreira et al., 2022). FACS analysis using hPSC-SNs derived from TRPV1::GFP and SCN9A::GFP reporter lines and stained with anti-CD200 (APC/Cy7) acutely before sorting also corroborated the nociceptor-specific enrichment of CD200 (FIG. 6C, 6D). Interestingly, our transcriptomic data showed that the gene counts of CALCA, which encodes a subunit of calcitonin gene-related peptide (CGRP), is enriched in TRPV1+ and SCN9A+ neurons based on the gene counts (Table 1), implicating a therapeutic role of these hPSC-derivednociceptors (marked by CD200 positivity) in promoting tissue healing based on a recent publication (Lu et al., 2024).

TABLE 1
Gene counts of CALCA, CALCB, TRPV1, SCN9A, SOX10 and RUNX1
in mature hPSC-derived TRPV1+ and SCN9A+ sensory
neurons and in early SOX10+ or RUNX1+ sensory neurons.

| | | Gene Name | | | | | |
|---|---|---|---|---|---|---|---|
| | | CALCA | CALCB | TRPV1 | SCN9A | SOX10 | RUNX1 |
| Cell | TRPV1+ | 10536 | 95 | 2600 | 3992 | 107 | 15187 |
| Identity | SCN9A+ | 2472 | 104 | 3296 | 5491 | 109 | 4039 |
| | SOX10+ | 10 | 245 | 3222 | 471 | 2447 | 951 |
| | RUNX1+ | 120 | 7348 | 2452 | 700 | 23504 | 10399 |

[0484] The differentiation of hPSC-derived neural crest cells into sensory neuron subtypes emerges as a hierarchical process; for example, Runx1+ nociceptive neuronal precursors branch into peptidergic nociceptors and non-peptidergic nociceptors (Chen et al., 2006). Subsequently, these two populations are sub-diversified by expressing various neuropeptides, receptors, and channels, such as CGRP, RET, Trp channel family, and Mrgpr family (Chen et al., 2006; Kim et al., 2008; Luo et al., 2007). Although most of the specification mechanisms have been studied in mice, the human counterparts remain largely elusive.

[0485] To construct the transcriptomic continuum of human peripheral sensory neurons, cells were purified including hPSC-derived SOX10+ neural crest progenitor cells, RUNX1+ sensory progenitor cells as well as TRPV1+, SCN9A+ and MRGPRX1+ sensory neurons during their developmental timing of peak expression in vitro (day 6-8 for neural crest progenitor cells, day 12-16 for early sensory neuron progenitor cells, and day 50-70 for mature sensory neurons) (FIG. 6E). Sequencing libraries were generated following the Smart-seq2 protocol (Ramskold et al., 2012). A total of >30,000 cells passed through the final quality control for sequencing. 1,000 cells randomly sampled from each of the five groups were merged and clustered based on their transcriptomic identities for further analysis (FIG. 6F). Eighteen transcriptomic clusters of developing and mature hPSC-derived DRG neurons were identified using Seurat and published human DRG neuron subtype markers (Hao et al., 2021; Lause et al., 2021; Nguyen et al., 2021; Tavares-Ferreira et al., 2022; Yu et al., 2023). Six clusters representing sensory neuron precursor cells were assigned the identities “SOX10+” or “RUNX1+”. Twelve sensory neuron subtypes were assigned, among which five are C-fiber nociceptors, four are A-fiber mechano nociceptors, two are of unknown identities, and one cluster represents a developing population of unmyelinated lineage (FIG. 6G). CD200 is enriched in clusters “C-nociceptors”, “developing unmyelinated lineage”, “cluster 13”, “A-HTMR” and “GRIK-enriched Cnoci/mechanoreceptors”, along with some low expression in SOX10+ and RUNX1+ sensory neuron precursor cells (FIG. 6H). Interestingly, RAB3A and RAB3C, two genes shown to promote the secretion of neuronal cell-derived extracellular (EV) vesicles during repetitive stimulation (Yang et al., 2024), show high co-enrichment patterns with CD200 (FIG. 6H).

[0486] Moreover, MiR-124, a miRNA shown to inhibit inflammatory responses through polarizing macrophages to favor the M2 phenotype (Essandoh et al., 2016; Qin et al., 2016), is also coenriched with CD200. These pieces of evidence indicate an attractive potential of CD200+ neurons to exhibit heightened ability of secreting EV s during continuing stimulation and secrete anti-inflammatory factors such as miRNAs to polarize the phenotype of local macrophages. To investigate relevant pathways enriched in CD200+ neurons, we performed Reactome pathway analysis and identified signaling pathways that modulate the nociceptive pathways (e.g., GABA receptor activation, neurotransmitter release cycle, and opioid signaling) or local inflammatory environment (e.g., ADORA2B mediated anti-inflammatory cytokines production) are among the top enriched pathways of CD200+ compared to CD200− neurons (FIG. 6I). Collectively, these data show that CD200 can serve as a reliable, specific nociceptor marker to purify cultures of primary sensory afferents in the absence of any genetic reporter system and exhibit attractive therapeutic potentials when applied in a cell therapy context.

[0487] FIGS. 7 A-7DD. illustrate a KCNQ2 as a gene therapy target gene conferring robust pain-resilience effects in hPSC-derived sensory neurons and the KCNQ2 gene therapy efficacy in a rodent model resulting in bone remodeling. To identify such novel targets, the molecular profiles of TRPV1+, SCN9A+, and MRGPRX1+ neurons was analyzed. Given the vital roles of G-protein-coupled receptors (GPCRs) and ion channels in transducing noxious stimuli, generating and propagating action potentials and maintaining resting membrane potentials, DEG analysis was performed and GSEA on SCN9A+ vs. SCN9A1−, TRPV1+ vs. TRPV1−, and MRGPRX1+ vs. MRGPRX1− neurons using membrane receptor-related gene sets to identify novel pain targets. This assessment identified potassium voltage-gated channel subfamily Q member 2 (KCNQ2) is significantly enriched both in TRPV1::GFP+ neurons (Log 2 FC=2.81, p-value=3.91E-22) and SCN9A::GFP+ neurons (Log 2 FC=2.05, p-va]ue=9.00E-12), but downregulated in MRGPRX1::GFP+ neurons (Log 2 FC=−3.29, p-value=6.76E-29), suggesting that its role in maintaining resting membrane potential and regulating neuronal excitability is specific to nociceptive neurons (FIG. 7A).

[0488] In a separate study, Waxman's group identified a gain-of-function mutation in KCNQ2 (p.T730A or c.2188A>G) that causes a hyperpolarizing shift in resting membrane potential by −5 mV, which conferred considerable resilience to pain in some patients with IEM, a well characterized human genetic model of chronic pain (Mis et al., 2019). Pharmacological modulators for KCNQ2 (retigabine and flupirtine) had been used in clinics but were later withdrawn due to significant side effects. Efforts to develop pharmacological KCNQ2 modulators have been limited, partly due to its expression in the Central Nervous System (CNS).

[0489] In an alternative approach, by installing KCNQ2 (p.T730A) mutation in mature CD200-purified hPSC-SNs using CRISPR-Cas-mediated HDR, in which SpCas9 expressed under a compact promoter elongation factor 1α short (EFS) and a HDR template carrying the desired edit and a sgRNA targeting KCNQ2 tagged by mCherry are separately packaged into AAV-PHP.s. SpCas9 was selected over other Cas9 variants due to its broad PAM compatibility (3′NGG), which enabled the selection of two sgRNAs that cut 1 bp and 6 bp away from the mutation site, respectively (FIG. 7B, see Table 2 for a complete list of sgRNAs designed to enable the p.T730A single-base editing of KCNQ2). To improve editing efficiency, we tested a broad range of multiplicity of infection (MOI) and different ratios of AAV-SpCas9/AAV-HDR-sgRNA and found out that AAV-SpCas9/AAV-HDR-sgRNA administered at MOI=20,000 and MOI=40,000, respectively, yielded the best infection efficiency with >70% CD200-purified neurons labeled by mCherry (FIG. 7C). To functionally evaluate pain-resilient effects of KCNQ2 (p.T730A), we examined the Ca2+ transients of edited CD200-purified neurons when exposed to capsaicin, mustard oil, and KCl. Results demonstrate that the KCNQ2 (p.T730A) mutation significantly dampened the response magnitude and decreased the percentage of activated neurons (FIG. 7F-7G). Notably, neurons installed with KCNQ2 (p.T730A) mutation displayed protracted response to KCl and significantly diminished Ca2+ influx at axonal initial segment and distal axon (FIG. 7F).

[0490] Exemplary protospacer sequences of the sgRNA are described in Table 2 below.

TABLE 2
CRISPR-mediated HDR and CRISPR-mediated base editing designs to install the
protective KCNQ2 (c.2188A > G, p.Thr730Ala) mutation in primary sensory neurons as a
treatment of chronic pain.
NM_172107.4(KCN02): c.2188A > G (p.Thr730Ala)

| | SpCas9 sgRNA | | | Cut to | |
|---|---|---|---|---|---|
| | Protospacers (5′-3′) | Strand | PAM | [symbol] | HDR |
| CRISPR- | CCCCCACGGGGGA | − | TGG | 1 | +Strand |
| mediated | GGTGCCG | | | | CCTCCTGGCAGCCACAGAGC |
| HDR | | | | | CACCCGCGCCAGGGCCACG |
| | (SEQ ID NO: 32) | | | | GCGCCTCCCCCGTGGGGGAC |
| | | | | | CACGGCTCCCTGGTGCGCAT |
| | GCCGTGGTCCCCCA | − | AGG | 6 | +Strand |
| | CGGGGG | | | | CTCCTGGCAGCCACAGAGCCACCC |
| | (SEQ ID NO: 35) | | | | GCGCCAGGGCCACGGCGCCTCCCC |
| | | | | | CGTGGGGGACCACGGCTCCCTGGT |
| | | | | | GCGCATCCCGCCGCC (SEQ ID NO: |
| | | | | | 36) |
| | GGCCACGGCACCT | + | GGG | 7 | +Stand |
| | CCCCCGT | | | | CTCCTGGCAGCCACAGAGCCACCC |
| | (SEQ ID NO: 38) | | | | GCGCCAGGGCCACGGCGCCTCCCC |
| | | | | | CGTGGGGGACCACGGCTCCCTGGT |
| | | | | | GCGCATCCCGCCGCCG (SEQ ID NO: |
| | GGGCCACGGCACC | + | TGG | 6 | +Strand |
| | TCCCCCG | | | | CTCCTGGCAGCCACAGAGCCA |
| | (SEQ ID NO: 41) | | | | CCCGCGCCAGGGCCACGGCGC |
| | | | | | CTCCCCCGTGGGGGACCACGG |
| | | | | | CTCCCTGGTGCGCATCCCGCCG |
| | | | | | CC (SEQ ID NO: 42) |
| | GCCACGGCACCTCC | + | GGG | 8 | +Strand |
| | CCCGTG | | | | CTCCTGGCAGCCACAGAGCCACCC |
| | (SEQ ID NO: 44) | | | | GCGCCAGGGCCACGGCGCCTCCCC |
| | | | | | CGTGGGGGACCACGGCTCCCTGGT |
| | | | | | GCGCATCCCGCCGCCGC (SEQ ID |
| | | | | | NO. 45) |
| | CGGGGGAGGTGCC | − | TGG | 7 | +Strand |
| | GTGGCCC | | | | CCTCCACCTCCTGGCAGCCACA |
| | (SEQ ID NO: 47) | | | | GAGCCACCCGCGCCAGGGCCA |
| | | | | | CGGCGCCTCCCCCGTGGGGGAC |
| | | | | | CACGGCTCCCTGGTGCGCATCC |
| | | | | | [symbol] (SEQ ID NO: 48) |
| | AGCCACCCGCGCC | + | CGG | 7 | +Strand |
| | AGGGCCA | | | | CCTCCACCTCCTGGCAGCCACA |
| | (SEQ ID NO: 50) | | | | GAGCCACCCGCGCCAGGGCCA |
| | | | | | CGGCGCCTCCCCCGTGGGGGAC |
| | | | | | CACGGCTCCCTGGTGCGCATCC |
| | | | | | C (SEQ ID NO: 51) |
| | GGAGCCGTGGTCC | − | GGG | 9 | +Strand |
| | CCCACGG | | | | CTCCTGGCAGCCACAGAGCCACCC |
| | (SEQ ID NO: 53) | | | | GCGCCAGGGCCACGGCGCCTCCCC |
| | | | | | CGTGGGGGACCACGGCTCCCTGGT |
| | | | | | GCGCATCCCGCCGCCGCC (SEQ ID |
| | | | | | NO: 54) |
| | | | | | −Strand |
| | | | | | GGCGGCGGCGGGATGCGCACCAG |
| | CCACGGCACCTCCC | + | GGG | 9 | +Strand |
| | CCGTGG | | | | CTCCTGGCAGCCACAGAGCCACCC |
| | (SEQ ID NO: 56) | | | | GCGCCAGGGCCACGGCGCCTCCCC |
| | | | | | CGTGGGGGACCACGGCTCCCTGGT |
| | | | | | GCGCATCCCGCCGCCGCC (SEQ ID |
| | | | | Cut | |
| | SauriCas9 sgRNA | Strand | PAM | to | Base editor |
| CRISPR- | TCCCCCACGGGGG | − | GTG | 1 | ABE8e |
| mediated | AGGTGCCG (SEQ ID | | G | | |
| base | NO: 59) | | | | |
| editing | AGCCGTGGTCCCCC | − | GA | 6 | |
| | ACGGGGG (SEQ ID | | GG | | |
| | NO: 60) | | | | |
| | GGGCCACGGCACC | + | TGG | 7 | |
| | TCCCCCGT (SEQ ID | | G | | |
| | NO: 61) | | | | |
| | AGGGCCACGGCAC | + | GTG | 6 | |
| | CTCCCCCG (SEQ ID | | G | | |
| | NO: 62) | | | | |
| | GGCCACGGCACCT | + | GG | 8 | |
| | CCCCCGTG (SEQ ID | | GG | | |
| | NO: 63) | | | | |
| | ACGGGGGAGGTGC | − | CTG | 7 | |
| | CGTGGCCC (SEQ ID | | G | | |
| | NO: 64) | | | | |
| | GAGCCACCCGCGC | + | AC | 7 | |
| | CAGGGCCA (SEQ ID | | GG | | |
| | NO: 65) | | | | |
| | GGGAGCCGTGGTC | − | GG | 9 | |
| | CCCCACGG (SEQ ID | | GG | | |
| | NO: 66) | | | | |
| | GCCACGGCACCTCC | + | GG | 9 | |
| | CCCGTGG (SEQ ID | | GG | | |
| | NO: 67) | | | | |
| | CAGGGAGCCGTGG | − | CG | 11 | |
| | TCCCCCAC (SEQ ID | | GG | | |
| | NO: 68) | | | | |
| | GCCACAGAGCCAC | + | AG | 13 | |
| | CCGCGCCA (SEQ ID | | GG | | |
| | NO: 69) | | | | |
| | CCAGGGAGCCGTG | − | AC | 12 | |
| | GTCCCCCA (SEQ ID | | GG | | |
| | NO: 70) | | | | |
| | GGAGGTGCCGTGG | − | GC | 12 | |
| | CCCTGGCG (SEQ ID | | GG | | |
| | NO: 71) | | | | |
| | AGCCACAGAGCCA | + | CA | 14 | |
| | CCCGCGCC (SEQ ID | | GG | | |
| | NO: 72) | | | | |
| | GAGGTGCCGTGGC | − | CG | 13 | |
| | CCTGGCGC (SEQ ID | | GG | | |
| | NO: 73) | | | | |
| | CACCTCCCCCGTGG | + | AC | 16 | |
| | GGGACCA (SEQ ID | | GG | | |
| | NO: 74) | | | | |
| | GTGCCGTGGCCCTG | − | GTG | 16 | |
| | GCGCGGG (SEQ ID | | G | | |
| | NO: 75) | | | | |
| | GGGATGCGCACCA | − | GTG | 22 | |
| | GGGAGCCG (SEQ ID | | G | | |
| | NO: 76) | | | | |
| | CCGTGGGGGACCA | + | CTG | 24 | |
| | CGGCTCCC (SEQ ID | | G | | |
| | NO: 77) | | | | |
| | SpCas9 sgRNA | — | M | — | Base editor |
| KCNQ2 | GGCCACGGCACCT | − | PAGG | — | — |
| hBE1-4 | CCCCCGTG | | GG | | |
| | (SEQ ID NO: 78) | | | | |
| | CAGGGCCACGGCA | − | GTG | — | — |
| | CCTCCCCC | | G | | |
| | (SEQ ID NO: 79) | | | | |
| | AGGGCCACGGCAC | − | TGG | — | — |
| | CTCCCCCG | | G | | |
| | (SEQ ID NO: 80) | | | | |
| | GGGCCACGGCACC | − | GG | — | — |
| | TCCCCCGT | | GG | | |
| | (SEQ ID NO: 81) | | | | |

[symbol]

indicates data missing or illegible when filed

[0491] Due to the generation of DNA double strand break (DSB), CRISPR HDR-based editing has been reported to introduce unwanted indels at the locus of editing (Chiruvella et al., 2013; Lieber, 2010). To improve the translational potential of KCNQ2 (p.T730A) editing, we designed two CRISPR BE-based strategies, in which SauriCas9-ABE8e, a DNA deaminase fused with D10A nCas9, catalyzes the deamination of adenosine to guanine without the need to generate D SB. Since the editing window of SauriCas9-ABE8e typically ranges from protospacer positions 3-16 (counting the PAM as positions 22-25), with optimal editing occurring between positions 5-15 (Anzalone et al., 2020), we designed the two sgRNAs to target the complementary strand so that the KCNQ2 (c.2188A>G) of the desired strand is placed at protospacer positions 12 and 6, respectively. While KCNQ2 BE1 installs the desired ACC (threonine) to GCC (alanine) edit with no bystander mutations, KCNQ2 BE2 also installs a CAC (histidine) to CGC (arginine) bystander mutation due to the presence of two A's in the editing window (FIG. 7H).

[0492] We next performed TA cloning and Sanger sequencing to verify the successful installation of the mutation and estimate the editing efficiency. Results demonstrated that 16 out of 21 clones harbored edited KCNQ2 (c.2188A>G) mutation, yielding an estimated efficiency of 76% in CD200 purified hPSC-SNs (FIG. 7I). To functionally examine the nociception-resilient effects of KCNQ2 (c.2188A>G) installed by CRISPR BE-mediated editing, we examined the Ca²⁺ transients of edited CD200-purified neurons when exposed to capsaicin, mustard oil, and KCl. Results demonstrated that the KCNQ2 (c.2188A>G) mutation significantly dampened the response magnitude and decreased the percentage of activated neurons (FIG. 7J-7L). Notably, morphological reconstruction and Simple Neurite Tracer (SNT) analysis (Arshadi et al, 2021) demonstrated that edited neurons showed fewer neuronal processes invaded by Ca2+ upon KCl administration (FIG. 7M-7N), evidenced by the diminished complexity index, number of nodes and number of tips (FIG. 70-7Q) compared to the unedited neurons.

[0493] We next examined the efficacy of KCNQ2 (c.2188A>G) mutation in alleviating osteoarthritic pain in a mouse model of osteoarthritis (OA). We performed anterior cruciate ligament transection (ACLT) surgery to induce OA in male and female wildtype mice preinstalled with the KCNQ2 (c.2188A>G) mutation via direct injection into the knee two weeks prior to the surgery and assessed for pain profiles two weeks after the surgery (FIG. 7R). Von Frey test showed a significant improvement in mechanical hypersensitivity in animals installed with KCNQ2 (c.2188A>G) 2 weeks after the surgery (FIG. 7S). Hargreaves test of the paw showed a favorable trend in the improvement of thermal hypersensitivity in OA mice 2 weeks after the surgery (FIG. 7T).

[0494] Hargreaves test of the paw repeated 6 weeks after surgery showed a significant improvement of thermal hypersensitivity in OA mice (FIG. 7U). Primary knee hyperalgesia was analyzed 6 weeks after the surgery by measuring withdrawal threshold during direct knee press using a pressure application measurement (PAM) force transducer. PAM withdrawal threshold (PAMWT) of animals installed with KCNQ2 (c.2188A>G) showed significant improvement in primary knee hyperalgesia (FIG. 7V). To investigate whether the direct left knee injection of AAV could confer long-lasting analgesic effects and show efficacy at the contralateral knee, we monitored animals for 10 weeks after the ACLT surgery. Hargreaves and Von Frey test at bilateral paws showed significant improvements of OA-induced thermal and mechanical hypersensitivity in QA animals receiving the AAV, to a level comparable to that of animals receiving the sham surgery (FIG. 7X-7Y).

[0495] PAMWT demonstrated significant improvements of bilateral primary knee hyperalgesia in animals receiving direct injection of KCNQ2 (c.2188A>G) at the left knee, although the right knee (contralateral to injection) showed less improvements compared to the left knee (FIG. 7Z). To validate the bilateral long-term analgesic effects conferred by the KCNQ2 (c.2188A>G) installation at a biomolecular level, bilateral DRGs were harvested that innervate the knee joints (L3-L4 DR Gs) at the 10-week endpoint. The expression of ATF3 (a neuronal injury marker) was elevated in DRGs from OA mice that received the control AAV (ACLT-Ctrl), but the heightened ATF3 expression was revered in DRGs of OA mice that received the KCNQ2 (c.2188A>G) AA V (ACLT-AA V), to a level comparable to animals that received the sham surgery (sham-Ctrl) (FIGS. 7AA-7BB). OA-associated bone loss is one of many pathological changes seen in joint tissues of individuals (El-Sherif et al., 2008, Haara et al., 2005, Simon et al., 2020). To examine whether the installation of KCNQ2 (c.2188A>G) could improve OA-induced bone loss, we performed microCT scans of bilateral knee joints harvested at 10 weeks after the ACLT surgery (FIG. 7CC). Animals receiving KCNQ2 (c.2188A>G) showed reversed QA-induced bone loss at left and right knees 10 weeks after the ACLT surgery to a level comparable to the sham-operated group, evidenced by improved trabecular thickness (Tb.Th), trabecular bone pattern factor (Tb.Pf), trabecular separation (Tb.Sp) and trabecular bone volume (BV/TV), although the reversal of bone loss seen in the right knee was to a lesser extent than the left knee (FIG. 7DD).

[0496] Altogether, these findings have identified KCNQ2 as a novel pain target, designed and optimized two genetic strategies to install a protective mutation KCNQ2 (c.2188A>G) in hPSC-SN s via 1) a CRISPR-mediated HDR template approach and 2) a CRISPR-mediated base editing approach, and validated the long-lasting analgesic effects of the optimized KCNQ2 editing construct in a mouse model of QA. In addition to the bilateral long-lasting pain-resilient effects, we also observed that our gene therapy strategy provided a robust reversal of bone loss in bilateral knees in OA animals.

[0497] OA-associated bone loss is one of many pathological changes seen in joint tissues of individuals (El-Sherif et al., 2008, Haara et al., 2005, Simon et al., 2020). To examine whether the installation of KCNQ2 (c.2188A>G) could improve OA-induced bone loss, we performed microCT scans of bilateral knee joints harvested at 10 weeks after the ACLT surgery (FIG. 7 CC). Animals receiving KCNQ2 (c.2188A>G) showed reversed OA-induced bone loss at left and right knees 10 weeks after the ACLT surgery to a level comparable to the sham-operated group, evidenced by improved trabecular thickness (Tb.Th), trabecular bone pattern factor (Tb.Pf), trabecular separation (Tb.Sp) and trabecular bone volume (BV/TV), although the reversal of bone loss seen in the right knee was to a lesser extent than the left knee (FIG. 7DD). Altogether, we have identified KCNQ2 as a novel pain target, designed and optimized two genetic strategies to install a protective mutation KCNQ2 (c.2188A>G) in hPSC-SN s via 1) a CRISPR-mediated HDR template approach and 2) a CRISPR-mediated base editing approach, and validated the long-lasting analgesic effects of the optimized KCNQ2 editing construct in a mouse model of OA. In addition to the bilateral long-lasting pain-resilient effects, we also observed that our gene therapy strategy provided a robust reversal of bone loss in bilateral knees in OA animals.

[0498] FIGS. 8A-8R illustrate CD200+ sensory neuron injection to intercept pain to treat localized pain and improve the bone remodeling by injecting hPSC-derived pain-sensing neurons. As purified CD200+ hPSC-SNs are enriched for genes conferring anti-inflammatory potentials to polarize local infiltrating macrophages and signaling pathways that modulate the nociceptive pathway, they present excellent opportunities for cell therapy to treat chronic pain caused by inflammation. We next explored the use of purified CD200+ hPSC-SNs in treating a form of localized inflammatory pain in OA. We injected CD200+ hPSC-SN s into the tibial tuberosity of immunocompromised NIH III nude mice after bilateral anterior cruciate ligament transection (ACLT) surgery-induced QA pain (FIG. 8A). We observed that animals receiving CD200+ cell injection displayed a mitigated mechanical pain hypersensitivity profile compared to the OA animals receiving heat-killed cells five weeks after injection (FIG. 8B). We also observed that OA-induced bone loss in the knee joint was reversed in the treated group at the five-week timepoint (FIG. 8C-8D). To validate the analgesic effects conferred by CD200+ injection at a biomolecular level, we isolated bilateral L3-IA DRGS (the DRGs that innervate knee joints in mice) to assess the expression of cell injury and pain markers (i.e., ATF3 and CGRP) and found that animals that underwent the ACLT surgery but received heat-killed cells showed heightened expression of both ATF3 and CGRP. However, the expression of ATF3 and CGRP were decreased in ACLT-animals that received CD200+ cells, to a level indistinguishable from animals that underwent sham surgery (FIGS. 8E-8F).

[0499] A substantial body of evidence indicates that OA involves additional recruitment of nerves that innervate the subchondral bone, and that this increased innervation is tightly associated with pain behavior in animals (Aso et al., 2020; Morgan et al., 2022). To examine whether the improved pain behavior in OA animals receiving CD200+ cells is associated with reversed recruitment of nerves innervating the knee joint, bilateral knee joints were harvested from animals at the five-week timepoint to quantify total fiber lengths (FIG. 8G). NeuroJ analysis using fluorescent intensity of PGP9.5 that stained for endogenous nerves demonstrated that the subchondral bone zone and tibia of ACLT-CD200+ animals showed significantly less innervation compared to ACLT-heat killed animals (FIG. 8H). Moreover, human-specific mitochondrial antibody (hMito) was showed that injected CD200+ neurons were localized in the tibial bone and subchondral bone area (FIG. 8G). To exclude the alternative hypothesis that a general population of hPSC-SNs could also confer analgesic and bone uncoupling potentials, we next injected CD200+ hPSC-SNs into the tibial tuberosity of immunocompromised NIH III nude mice after bilateral ACLT, whereas the control animals were injected with CD200− cells (FIG. 8I).

[0500] At the five-week timepoint, PAMWT and Von Frey results demonstrated that ACLT-CD200+ animals showed significantly improved mechanical hypersensitivity while ACLT-CD200− animals maintained OA-induced mechanical hypersensitivity with no significant improvements (FIG. SJ-SK). To examine whether the improved pain behavior in OA animals receiving CD200+ cells is associated with reversed recruitment of nerves innervating the knee joint, we harvested bilateral knees at the five-week timepoint to quantify total fiber lengths (FIG. SL). NeuroJ analysis using fluorescent intensity of PGP9.5 that stained for endogenous nerves demonstrated that the subchondral bone zone and tibia of ACLT-CD200+ animals showed significantly less innervation compared to ACLT-CD200− animals (FIG. 8M). To assess the analgesic effects of CD200+ neurons over CD200− neurons in the context of OA at a biomolecular level, we harvested bilateral L3-L4 DRGs innervating knee joints and quantified the expression level of ATF3 and CGRP. Results demonstrated that DRGs from ACLT-CD200− mice expressed significantly higher levels of ATF3 and CGRP 5 weeks after the injection, an elevation reversed by CD200+ neuron injection (FIGS. 8O-8P). To assess the long-term efficacy of CD200+ neurons injection, we examine mechanical hypersensitivity of animals 10 weeks after injection. Von Frey and direct pressure at knee tests demonstrated that ACLT animals receiving CD200+ neurons displayed significantly improved mechanical hypersensitivity compared to ACLT animals receiving CD200− neurons, to a level indistinguishable from the control (FIGS. 8Q-8R). Altogether, we have demonstrated that the SNIIP strategy using purified CD200+ hPSC-SNs has potential to not only alleviate OA-induced pain, but also modulates the pathological bone coupling in OA and reversed OA-induced bone loss. We anticipate the use of CD200+ hPSC-SNs is not limited to OA and have great potentials for treating other pathological pain conditions.

[0501] FIGS. 9A-9K. illustrate in vivo survival and function of SCN9A+, TRPV1+, and MRGPRX1+ neurons. To explore in vivo survival and functional integration abilities, we transplanted FACS-purified hPSC-derived mature TRPV1::GFP+, SCN9A::GFP+, and MRGPRX1::GFP+ hPSC-SNs, and differentiating neural crest cells into the right L4 DRG of adult Rag2^{emlhera} Il2^{emlhera}/HblCrl rats (FIG. 9A). An expression cassette harboring TdTomato and excitatory (Gq) designer receptors activated by designer drugs (Gq-DREADDs) was packaged into AAV PHP.s and later transduced into hPSC-SNs prior to the injection to allow for chemogenic modulations (FIG. 9B-9C). When maintained in vitro, transduced TRPV1::GFP+, SCN9A::GFP+, and MRGPRX1::GFP+ donor hPSC-SNs showed extended axons (up to 800 μm-1 mm) 5 days after plating with visible groVv1h cone (FIG. 9D). Left (contralateral control group) and right (injected group) L4 DRGs were isolated from animals 5 weeks after transplantation surgery to examine the survival of hPSC-derived donor neurons. While GFP background was low in the control DRG (FIG. 9E), the injected DRGs and attached nerve roots harbored clusters of GFP-expressing hPSC-derived donor neurons with axonal sprouting (FIG. 4F). To investigate whether the survived hPSC-derived donor neurons could establish functional connections with endogenous neurons, we examined the behavioral consequences of rats 4 weeks after the initial hPSC-SN transplantation (FIGS. 9G-9H). Spontaneous pain behaviors were assessed using video-observation of rats after intra-peritoneal administration of the DREADD activator CNO and PBS. Duration of right hind paw licking was significantly heighted after CNO administration compared to PBS (FIG. 9I). Mechanical allodynia was examined using Von Frey tests 7 days after the initial CNO administration or acutely after CNO administration. The injected side displayed a significant decrease in threshold 7 days after the initial CNO administration and 1 hour after acute CNO administration FIGS. 9J-9K). Taken together, these data show that injected hPSC-SNs could survive in vivo and modulate endogenous neuronal activities by sensitization or direct excitation (FIGS. 9J-9K).

[0502] In conclusion, the study presents that TRPV1::GFP+, SCN9A::GFP+ and MRGPRX1::GFP+ hPSC-SNs can be generated and confirmed their functionality with multiple pain and itching stimuli. The hPSC-derived TRPV1::GFP+ and SCN9A::GFP+ neurons also display great potential for in vivo survival and functionality after transplantation. These data provide new insight on stem cell fate determination processes toward a specific sensory neuronal subtype, open new avenues for chronic pain therapeutics using cell therapy, and build a foundation to develop novel drug candidates for managing persistent pain/itching conditions. The various embodiments described above are provided by way of illustration only and should not be construed to limit the scope of the disclosure. Various modifications and changes may be made to the principles described herein without following the example embodiments and applications illustrated and described herein, and without departing from the spirit and scope of the disclosure. For example, unless otherwise explicitly indicated, the steps of a process or method may be performed in an order other than the example embodiments discussed above. Likewise, unless otherwise indicated, various components may be omitted, substituted, or arranged in a configuration other than the example embodiments discussed above.

### Example 3. CD200^{high} hPSC-NNs Promote Joint Homeostasis by Depleting Inflammatory Factors and Secreting Reparative Factors in Human and Mouse Joint Tissues

[0503] Another study sought to determine whether the analgesic and anti-inflammatory effects of CD200^{high} hPSC-NNs were mediated through the direct binding and sequestration of inflammatory mediators. To assess whether CD200^{high} hPSC-NNs were activated in vivo in response to inflammatory stimuli, immunostaining was performed for the neuron-specific injury marker ATF3 in STEM121+ transplanted cells. Notably, CD200^{high} hPSC-NNs displayed significantly elevated ATF3 expression compared with CD200^{low} hPSC-SNs in ACLT animals, consistent with the hypothesis that CD200^{high} hPSC-NNs are activated in vivo by endogenous inflammatory mediators (FIGS. 10A and 10C). To further test their responsiveness to inflammatory cues, calcium imaging was performed following acute exposure to synovial fluid from OA patients. CD200^{high} hPSC-NNs exhibited rapid and robust calcium transients upon stimulation with synovial fluid from two independent OA donors, whereas CD200^{low} hPSC-SNs showed delayed and significantly attenuated responses with a significantly lower proportion of responsive cells, comparable to responses elicited by pooled synovial fluid from healthy donors (FIGS. 10B and 10D).

[0504] To further elucidate the mechanisms underlying the analgesic and immune modulatory effects of CD200^{high} hPSC-NNs, a proteomic analysis was performed on conditioned supernatants collected from CD200^{high} hPSC-NNs and CD200^{low} hPSC-SNs following overnight incubation with synovial fluid from two osteoarthritic patients (OA hSF) or pooled healthy donors (healthy hSF) (FIG. 10E). Differential expression and gene ontology analysis of the proteomic profile revealed a significant downregulation of proteins implicated in bone inflammation and cartilage degeneration in OA hSF incubated with CD200^{high} hPSC-NNs compared with CD200^{low} hPSC-SNs. Among inflammation-associated proteins, ST3 beta-galactoside alpha-2,3-sialyltransferase 3 (ST3GAL3) activates the Toll-like receptor 9 (TLR9)/MyD88 signaling pathway, whereas the apolipoproteins apolipoprotein C3 (APOC3) and apolipoprotein C2 (APOC2) promote inflammasome activation and pro-inflammatory macrophage polarization, respectively. Among the proteins implicated in cartilage degeneration, nerve growth factor (NGF) stimulates the production of MMPs and facilitates neurovascular invasion, while Rho-associated coiled-coil kinase 2 (ROCK2) and mitogen-activated protein kinase 1 (MAP2K1), two essential proteins in the Rho/ROCK and MEK/ERK pathways, mediate degradation of chondrocytes and the surrounding extracellular matrix (ECM) (FIGS. 10F and 10H). Conversely, proteins and pathways implicated in cartilage repair and ECM remodeling were markedly enriched in the OA hSF group incubated with CD200^{high} hPSC-NNs compared with CD200^{high} hPSC-SNs. Notably, thrombospondin-1 (THBS1) exerted pro-chondrogenic effects31 while chitinase 3 like 1 (CHI3L1) inhibited cartilage matrix degeneration by modulating the TLR4-MAPK-STAT1 pathway (FIGS. 10G and 10I).

[0505] To control for passive release of intracellular contents from dead cells, proteomic analysis was conducted on knee joints harvested 10 weeks post-injection from sham-heat killed, ACLT-heat killed, and ACLT-CD200^{high} groups to identify differentially regulated human and mouse proteins (FIG. 11A). Due to the predominance of mouse-derived proteins in the joint tissue, the detection of human proteins fell below the threshold of proteomic reliability. Quantification of differentially expressed proteins across the three groups revealed a divergence of the proteomes between the ACLT-heat killed and sham-heat killed groups, and a remarkable similarity between the proteomes of ACLT-CD200^{high} and sham-heat killed animals (FIG. 11B). Differential expression and gene ontology analysis showed factors implicated in inflammation and joint degeneration were significantly enriched in ACLT-heat killed animals but, strikingly, were reversed in ACLT-CD200^{high} animals. Among these proteins, matrix metalloproteinase-8 (Mmp8) promotes chondrocyte apoptosis and cartilage degradation33, and mitogen-activated protein kinase 13 (Mapk13) increases expression of catabolic enzymes34 (FIGS. 11D, 11F, and 11G). Conversely, proteins and pathways involved in anti-inflammation, ECM remodeling, and joint homeostasis were suppressed in ACLT-heat killed animals but restored in ACLT-CD200^{high} animals. Among these proteins, olfactomedin 1 (Olfm1) inhibits osteoclast differentiation, while ECM components including matrilin-1 (Matn1), matrilin-1 (Matn3), tenascin XB (Tnxb), and multiple collagen peptides are essential for cartilage integrity (FIGS. 11E, 11H, and 11I). Notably, among the genes enriched in both OA hSF and mouse knee joints following CD200^{high} hPSC-NN treatment, paraoxonase 1 (Pon1) is an enzyme that protects lipoproteins from oxidative modifications. Together, these data suggest that CD200^{high} hPSC-NNs act through a dual mechanism in OA, simultaneously sequestering pro-inflammatory mediators and secreting factors that promote bone and ECM remodeling, thereby creating a reparative, anti-inflammatory microenvironment in human and mouse joint tissues (FIG. 11C).

### CONCLUSION

[0506] In sum, these findings present an alternative application of hPSC-derived cells that diverge from this traditional regenerative paradigm. Furthermore, the results demonstrate that hPSC-NNs can function as therapeutic agents by modulating the inflammatory microenvironment through both ligand sequestration and the release of reparative factors in mouse and human joint tissues instead of simply replacing damaged tissue.

### Example 4: Targeted Base Editor Reduces Pain Indicators in Animal Study

[0507] FIG. 13A depicts an animal model in which mice with or without spared nerve injury (SNI) received intrathecal injection of either a targeted base editor or a nontargeting control, followed by pain-related functional assessment 20 weeks later. The targeted base editor comprises a CRISPR sgRNA sequence that targets KCNQ2. The nontargeting control comprises a control sgRNA sequence that has no known genomic target as a control sequence.

[0508] FIGS. 13B-C show uptake of the KCNQ2 gene editor across cervical, thoracic, lumbar, and sacral spinal regions using mCherry-labeled TUJ1 antibody. FIGS. 13D-F present pain-related measurements for each cohort; notably, FIG. F shows that SNI mice treated with the KCNQ2 base editor exhibit reduced paw withdrawal efficiency—comparable to uninjured mice—relative to control-treated SNI mice. In FIGS. C-F and throughout the present disclosure, “*” refers to a p-value of less than 0.05, “**” refers to a p-value of less than 0.01, “***” refers to a p-value of less than 0.001, and “****” refers to a p-value of less than 0.0001.

### Example 5. KCNQ2 Base Editor Shows No Significant Effect on Itch Behavior

[0509] FIG. 13G illustrates an animal model in which mice received intrathecal injection of either a KCNQ2-targeted base editor or a nontargeting control, with intraplantar BAM8-22 injection and measurement of itch-like biting performed 20 weeks later. Results are shown in FIG. 13H.

### INCORPORATION BY REFERENCE

[0510] All references, articles, publications, patents, patent publications, and patent applications cited herein are incorporated by reference in their entireties for all purposes. However, mention of any reference, article, publication, patent, patent publication, and patent application cited herein is not, and should not be taken as an acknowledgment or any form of suggestion that they constitute valid prior art or form part of the common general knowledge in any country in the world.

The application's sequence listing, which the Patent Office published only in electronic form, follows.

SEQUENCE LISTING (97 sequences)

SEQ ID NO: 1 - DNA, 235043 bp, synthetic construct
  source 1..235043: mol_type = other DNA
agtgatcactctcagttcatgagtgaaaaaagttaggtttagaaaggttatgaagtttttatatggcagagaccctataagtaaaaaggccaggactctaaaccaggtccagttacagagccttaatgtgttttctctcacactcgctctctcgctcgctcgctctccatctcccgctgtcccactttccccatttggtgcagtaaattttaaaagtagagacattccctggaaaaagggaagtcataagggataaaattatagaagttgaaaaattcaacgttttgtgaatgctgaatactaaaggtaaactcagatcctattcagataaagatatatctgagactgaagggcttactgactactggggggaaacgtaatatgcagctggttataatatgtgataatttttatactgtgagtgtacattgtaatacacatataggcaggaatgatgggttctgtgttggatatcagaggtgaagtgagtaaagtgggctcctgcagagaaaggaggactttgtcaattaaagaaggcaattttattaaacacagaggcacttttaaggagaagagtccaccacagatatgagacctaggcatccagcttatagttcttcagcctggaggataaagagatatgaaccaaggagacgatgcaatccctattgcagagattagctagaaaatctgagcagaattactctggacacctcaaatcccttctcagacatgttttatttttccctttggtttttgaactttctcttctgttgtctgttcctttccataaattctgggtctgcattcttagctatgatggttaataaagaactccaatgaatgatttgagtcttcacaagtggaaattttcatctttatgttcggtaaactaaaactttcaggcttagacacttaatcatctcctcatctgtatggaaacctctgtcttcaactacttataatcacacactgactcaaataattctatctcaactccagccctaggttctactctctatccaggtggcgtaaccctatactccttgattctggtctaggctttttgaaagcctacaccttcaaatgatccataagttctcagtccacatttatacacaattttatcaccatttttccttattttctccctccatgttgtcctgtaataaaaatctgttgagcacctcctaggtattaggcacaacaatttagagataaatagggttgctcttatctttaaaaagtcatttcttagtgtgacaagtaaaacaccatgttggaactatttgttaactcccttccaataatggagatcctcaacaagggctagtggaaaatcttactgaacttagcagaaaagctggatcttaagctaagtgttcaagtaaatgggattttgttggaggtcatgatgaatatgaggaatgacatcctaagctgaagtgacagcaaatatagaagtgtgaaaaatagagtccataaaccccaagtctctctacttgtatgtttatgcaaaaagcattcaaaaaatggcatgagatggtagagttggattctagaatgtgttcatatgagggaaagaaaaatgacaactcaagagtgttaaggttgaggtgacctcaaaggaacacttagactgggtgcagtagctcatttctgaaatctcagcactttgggtggccaaggtgggaggattgcttgagcccagtagttcaagaccagcctgggcaacatagtgagaccctgtctctaaaattttaaaaaaggagaacacttaaagtgggttttctcaattaccaagcaaaacctatcttatacatgaaattgctcgtattgtctatcattctttttaaaatatatttattgagacatgattaacatatgaaattctccttgtacagtatataattagatggttttagtatattaacagagctgtacaagcatcacagcaattcaagtttataacagttttatctctgttgagagtcactccatattccaccatcacctaaccctagaaaaccatgaatttactttctgtctctatagatttatctgttctagacagttaatattaatggaataatataatatgttattctttttcttttttgtttaacttttattttaagttcaggggtacaattgcaggtttgttacataggtaaacttgtgtcatggggatttgttgtgcagattatttcatcacccaggtcttaagcctagtacccattagttatttttcctgattctctccctcctaccaccttccaccctccaaaagaccccagggtgtgttgttctcctctatatgttcatgtgttctcatcatttagctcctgcttataagtgagaacacacagtatttggttttctacttcggtgttagtttgctaaggataatgtcctccagctccatccatgtctcagcaaaggacatgatctcattcttttttatggctgcatagtattacatggtcagtatgtaacacattttcttcttatacactgttggtgggagtgtaaatatgtgattttttttttgtgattggcttctttcatttagcacaatatttcaaatgttgtagcaggtatcattatttcattcctctttattgctgaataatatttaactatgtggatgtattatattttatttatccattcatcatttggattgtttccacattttgagtattatgaataatgctgctgtgaacattagcgtacaatttttgggtagatccattatttcaattctcttcactatatacttagaggtgaaatttgtaccactatgtttaatttattgataaactgctctactggttttcaaaattgttgcatcattttatattcccaccaacaatgcatgtggtgccaatttttcacatccttgctaacatctgttatctgtatttttgtttatagcaatcctgagtatgaagtagattctcactgtagtcttgatttgcactctgctaatggctaattatgttgagaacgttttcgtgagtttactggatatctgtatgtcttctttggagggatgcctattcaaatccattgcccatttttaattgggttatttatcttttattgctgttcttcctatattttagatagcagttctttattagatatatgatttgcaaatatttttatcatgttatgtgagttgtctttttactttcttgattgtgtcctttgatacacaaaagctttaattttgttgaagtctaatttatcaaacttttgcttgtacttttaggatatttgagaaactattgcctaatccaagcttacgatgatttactcccatgttttcttctaagagttttgtgcttttagctctcatatttaagtttatgcttctgagttaatttttgtgtgtctatggtttaagaaaggggtctaagatcatgcttttgcatattgctatccagccgtcccatttattgagtattgttctttccccattcaattgtcttgacactcttgttgaaatcaattgaccataaatgtaacatttatttctggattctctattcctttgacctatatatctattctttttccatcaccagactgttttgattgcagtagctgtgtagtaagcttggaaataagaagatacgactccttcaactttgttctaaatttttttcaagatagttaggttattctagggccctgtcctgttcctacataaattttatgataagcttgttaacttctacaaaaagccaagttgggattttgatagggttgccatcaaaaccctaccaaattgttttgagaatcgtttgggtatttttgccttatttttccttattcattaatatggtatgtattttacttttatttacaggtttatcaattttattgacttttttaaagacagccttttgtttcattgatttttcctgttgttttccatttttctattttataggattctcctattatctttgttatttcattctttctgcttgctttatatttattttgctctttataattccttgagttagggaattagggtttttttgagacatttattcatagccaatataccctttaagataaaaagttttcacctcgacattatttagtggcattttacatattttgatatgttataattttttttcattcagttctgtgtattttaaaaatttcctttaaggcttcatcttaggccctacgtattttttaatttcctttaaggctttctcttaggaccatggatttagaagtgtgctgtttaatttctacagatttggagatattccttctgttttatgttattaatttataattttatccctttgtggtcaaagaatacactatatatgactttaattcttttaaatttattgaggtttgttttacgaccctggatatggtgtatcttagtaattgcttcatggacacttgaagaaaatgtgtattctgcaattgttggatgaagtgttgcatatatgtttgttagaccctgttcactgattgtgttgttcagataatcaggatatagaatctttgctgattttctgtctggtgtttttatcagctcctgagaaagagctgttgaaatccccaactacaattatgaatttttctgtttctcctttcagcactctcagattttctttttttcttttttatttatttatttattattattatactttaagttttagggtacatgtgcacaatgtgcaggttagttgcatatgtatacatgtgccatgctggtgtgctgcacccactaactcgtcatctagcattaggtatatctcccagtgctatccctcccccctccccccaccccacaacagtccccagagtgtgatgttccccttcctgtgtccacgtgttctcattgttcaattcccacctatgagtgagaatatgcttacatgtattttgaaactctgttttttgatgcatatatatgactggtatttcttcctaatagcttgcttttttgtcattatgtaatgtccctttttgtatttaataattttctttcctctgaggtcaactttatcagataacaatatagcccattctattttttttttaattaaggtttgcatggcaatttttttcatcattttactttcaacctatgtatgtcattgaatgtgaagggagtttcttgtaagcagcatttagctgaggtatactttttatccatttttttgttgatgtattcagacctcttacacttgaggcaattattgatataccagtacttaagattaccatttattagttattttctgtctgttttctctggactcagatctctgtttctcttttctcttcttcctgcatgttcctggaacatattttaggatttcatctggtttaattatagtgattttgagtgtatcatttttggtagtggttgttctgagtattcctgtatttatttatctctctatctatctatctctttataagtctactggtatcactattttaacctcccattttcttctccatttttataatatcatcatgagaatgagactatgctataattttgttccaatcatcaaacatcacttagaaagcacattgtatgcacctatatttctgctttttgtagtattatttcttccttcctgatgctccatgatctcttcttttattcatcttttctgttagaagaattctattcagccaatctttaagaattatgtctgctacagaatgtaaaatatcttatgttctcacttataagtgggataatggactctagggactccaaagtgaggaaggtgggagggagctaagggttgacaaattacctgttgggtacaatgttcaatatttgggtgaggtggtgggtacactagaagcctaaacctcaccactactcatgtaatacccatgtaacaaagaagcacatgtacatcttggatcttcaaaaaaaaatactctccgtgggtgcacattcacagttgaaaattgtagttatctaagaggattctttttaaatagtacatctatgttgtatacaggatttgggggcctaatgtttctcattcttgctttacaatttcatattactgtgtttcttatttagaaccatttcttgacaacagtgtattgtggttcagttttacctatgtgttatgattgaatttcaatgtcaatttgcaactctgtgtgtacactttaagtcaatacggggtttaatgaaaatataagtcagtgatttctatcaccatcatctctctctggctgcatcatctgtctctggctgcattccagatttttctgcctttaatattcaacattttaatatgatgtgtctggaaacttttcagaaatgcatattcagtggccctaccacagaatcagaaattatggtagtggggcttgtgttagcaagcccttcaactgattctaatgcacagtaaagtttaagaaacagttaccgagatctgtaccagtagctactagtcatatgtgactattcaaatttaaaataattagcaaataaaatcaaaactttagtttctaaatcccactagccacatttcaagtattcaataaaagcctgtatctagaggccaccgtatttgatagcacatatttattccattttcatcatcttagaaagcactgctaaacaacattgattgaagaataaatgaaatttgtcagagtagtatatttgtaacagtttatcagctgtactggatatcttccttttaccctgccagaactactctttacccttcttctccttgtgctcagctcttagagactcactcacaagagctgtttcaatgggttctcttgacctccggcttccggttgggtttgaccaatgggaagccccggaccaagtgtttgctccctccccagtcactgggtatagtttccgttctttacctatggccacaatttctgtaaatgtttcttatatctacatctaatctctagggcaatttttggtaactattcctttcttgtcccttcagtcttagaagcagaatcccttggtttctccttaaaccttgcctacagtatttacaggcccctttgcttacttttcttcagatggtctccttggagtgtgacttcttctttctacaataattgcatatccctggttcatgcatcagctgaacttttggcctttagtaggtttagaaactgaaataactcaaattttatctcctatattagtgttccccagagtaagcttaaatcttatttctctccattaaaatcaagataaagagagaaaaaaagaaaaatgaaggaaagaggaaggaaagaatgaaggaaggaaggaaggaaagaaggaaggaagggaaagaaagaaggaaattatctattatagggtgcatactatgattcttgtattttgttgagtatgttgcacaagcttggaaccacagtagaactgctcataaaaatgagtgccatgctctgtcattctgaggagcaaaactgcaaacaattcaggacacgcacagtgattaaaactcttcaatatttttcttaataaataggagctttagccgggcgcggtggctcatgcctgtaatctcagaactttgggaggccgaagtgagtggatcacgaggtcaggagttcgagaccagactaaccaacatggtgaaaccctgtctctactaaaaatacaaaaattagctgggtgtggtggcgggcgcctgtaatcccagctactcaggaggctgaggcaagagaattgcttgaatctgggaggcggaggttgcagtgagcagagatcatgctactgagctctagcctgggtgacagagcgagactccatctcaaagaaataaaataaaaaataaataaataggagctttagatggaataaaactttattttctaactaggtatcatcattaagatgattacattatctgaaacctaacctgaatataattgcacagtgttaacaggtagcatagctgtctaacataacatcccatgataattgactcttaattaactgtataggtattataagcagtagttgctaatcctacattgacttttacttttttgcttagtagaaatctctccaagattcctaaacaaaaactaacaggaaggaatttatcgtgaacccatgaaacagtgcaatgtaaagcagggatgcctttttgatctttgagtatttcatcttgtttcatatgtgaaagagcccccttggtttgctgaataaatatttctttttaattgttctaacaatcatgcttgatagttctggtcaagaaaacgatttgttttctcaactgagtgaaccttctttagaccaagttggagcactgacatatttaggacaagcaagattccatgatagtaacatcagtttgattaagggagacgagtggtttttattttttttaacatcacagaagtgacgaatattcatctctaagatgtctacttttctcttgacctttaaattactaaatatattgctgtgtcctcacattgctttctgcagaaatacaacaacaacactggatccttccagtgtacgcaaagattctgctgcagtgcaacccaagcacaaccagccaaggtctgctggggatctctgctgctgcagcattttatgcacacaggaaaggtattgtgaataatgtacagttataagcaggtgaccaaatcaagcttccttcacttaatgctattcccaagtacactctgagggaagtaattggatacctttattagcaattgatctatagaggaagaaagtgtgatgaaaagccttgcaaggcattgattgcatgtgcattagcttacactgatctgcagtacttttacagaaaactcacataaattaaaacaataaccagaattctatcactaaacagaaatataaaatatatagaagcctcaagtatgaaaatccagagaaattctttcactatagattatttaagaagcaaaagcagctatcatgaggccatcttataattggacaagtgcttgtgatgtactattcagtgctgatgtgccactgatggactagcttgtaggatatgaatccactctgttctattttcttaacaccgatgatgagaagtgtcaggagatgccaggcaccttcctggaatagctatcattattccccagtataatcacattaccttttgattattttagataaaaatatagaggatatttttccctcaataacagactatgcattaaacgtacaatataacagcctttgtgcatttactttaattagccaaaattattaacacaattgcctaagtgtaattgctgctattgatggggggagagtggatgacccccatggtctcatcatatactacagatatcagcctcttgactttttacacaaatcaacaagcaaatggaaatgtggtgtactattataactataccatgaattattatgtagtaaacacaggcatgcctaagacattataatgttctctgtatgttttatattgattgttttcccttggtgaatattgttattaataaatcttgtataatattaattgtatgggatatttttctttctgagattataagatagagtcattcacgtcagtgctctggagattctatgttgttgattatagaaagttttatttaatcattactctgtcattatgctctccatgtcttagttatccctgctcatcttcattggtttaatgcataaaaattaaatattctaatgctgaagagaaaaaatgaaatttcaagctgtcgttattgtgggggtacaatcactgagaaaattagatttatttaaggttatttaaaagtaaagttagggtcttctgtttccatttaggatggattaactgttgtggaaactgctgtgtcattgtaaaactagaaaacgagataaagatatgaaacgaatgtctttagacattgaaaaataggtaacacaggactgtgaaacatgacagaagggatcctgagacaacaaaaatgtgaggatccctgtcctgtatgaaatgctactctggacctgacttaaatatactttaagcctcaaaaaggttaaactactctgaacatagtttaagtgcctggtatattttagaaatataataaaatatagcacattataaaattcacactgtccagtgtccagtgaaaatatttagggtagggaagaagcagataatatgacttttaactagaaggaaaaagaaacaaaaatcggttaccatataaactatgaaatcagcagactagaatattaaactagctattatatatagtataactgtgaacaaaagcataaaggaacacataaatgtaataagaagagaaattggaaatgttttttaaatacccaaatggaagtattagggatttttaaaaaatcatccaaaatgaaaaataaactgaatgggtttaaatgcagattagacactgcagaagagatcaatgaacttgaagctgtaggaataaaaactatctaaatttaacaaggagaggaaaaaacaaagtgcttctatgacccatgagccaatacgtagcaatttaaaatatgggtaatatttccaaaatgaagataaatagatgctttttaagacaaacacaaaataattgaattgaccaccagtagtgctatactacaggaaaggccaaaggaatttcttcaggcagaaagcaaatgatatcagattgaaatgtggatgtaaacaatagaatgaagaacactagaaacataaacatgtggattaatgtaaaaaacattttatcattttgaatatattttaaaagattgtgtaatgcaaagataacaacgtctgttgttgatgatgtatttgtaatacatattacatatatataagaaaaatgtttaacaatagtacaaaggacaagactgatgaaatagatttatactgaattaagatttgtatactacacatgaggtagtataataatagtatttcaagttaggctgtgataagttgaaacaatatattgtaaattgcagaataataattaaaaatataaaacaaaaagaaaggctaataagccaatagagggaatatattaaaatcctaaaaatagcaaattatttttaaaaatttgtaaaacaaaaaggaacagattggaagaatagaaaacaaattgcaagatgattgatttaaatgacattatatattgataaaaatgttaatagttacatcattaaaatacttctaaacataacttaaaattaacaatgatgtcaaatagaaattttaaattacaaaacccacattacatatgaagatacaaacagattaacaacacaaaattgtgataaaatatacatgcaaacaattcaaagaaatttggactgaccgtattaaaattgaaaataagtagatttacaagaaagtgatattatcagagataaagatgtatattttatagtaataaaggaggcaaattaacaagaataaatagcaatcttaagtgtgtatgaatataatagcatagcttcaaaatacataaagcaaaactgatggagataaaaggaaaaataaccagttcctaaatataatcagagttttcaacactcctctttcagtaattagtagaacaagtacacaggtagtcagaaagaatgtagatgtgaacaaccaacttgacttcattgacatttacaacactctcctaacataagcagaagacacattcttttcaagcacaagcaaagtattaactgatacataataagctagaacataaaacaagtgtgaacaaatttgaaagcactgaaattattcaaatatgttctctgactccatcaaaattaaactataaagcaacaaataagagctatatgtaaaatcccctatttaaaaaaaaaaaggaaaagtcatttctaaatgatccatagatcaaagatgtagtaaatctgtctttatttgcagacaaatacattacctacacctaaaatcttactaagtttttagaaggaaaaaactattccacctaatagagtttagctggtacaaggtcaataaacatagagtgtttccctataatatgatttaattactgaaaaattaacttaattaaaatgtcaaattcaatgtacaagaacattttttaaatgaagtacttagagataaatttgacaaactgtgtgtaagacctatactgtaaagactataaaacattttttagaagacttaaacaagacctaaataaatggaaaaaaatacgttgctcatggattggaaaatccaatattgctaggatataaatttttttccaaattaatctgcaggttcaacatgatcccaataaatatcacagtagatatcatcaaaccaattataaaatttatatggaaatgcaaagatcctagaatagcctagataaatttgaataagagtaacaaacttggagaacttttattacctggtttgaaaaacaaccagaaagctgcaataatcagggtagtgtagtatgagggtaagaattatgtgccaagctcagtgttaaggtctttatataaatacagttttatttaatcctcacagactcatacaaggcaggtgttattattcctatgatgagagagctagggcccagagtgttcaaataactctcaggataacacaattaacaaacttcacctgtctctgaagcctagccttttaagacacaatagtatgttttatcccttcatagagttgtttcaaattctttctaaaaatggatgttctttaatactgactctaaacatacttgttcagatatagaaattccaaatttaaatgtaggacagagaagatgatatctcattattttacagctcattacccgtcatatttcaaagtaaaatcactgaaaaataggatagaaagtcaagtgattgcgggaataatgttaaagaaaataaattagtcaaagggagtcattatgttttcaattcctgagaactccaatgttcttgccaacccaacctgatgacacagatgattttccaaatatatatgataaaggtgacttccaaaaacctgtagagtagatcatttaaagctacaatgagccagtggccatcatttcggctatcgccctcctcttccttctccagatcccatgaggctgatgcttgtgatgacatcccttaatgccaatggcctagaaatttagcaaaggtaaatgtgtcaattgggtctcagtttgcacatctctggagatctggttcagatatatatttttgagggtgtccaaaagttacaagaatatatggatggctgaaccttcagacaaatcccttttgttccaacaacattgttgaagcatggaatttgatatgatttggctgtgtcctcacccaaatctcatcttgaatgtagctcccacagttcccacatgtcttgggaaggaactagtgcgaggtaattgaatcatgggggtgggtcttttccatgctgttctcctggtagtgagtctcacgagatctgatggttttataagggggagtttcccttcacaaattctctcttgtcgtcaccacgtaagaagtgccttctgccatgattgtgaggcctccccagccacgtggaactgtgtgtctattaaacctctttttctttataaatacccagtttcggttatgtctttatcagcaggatgaaaatggactaatacagaatatgatgatgaatactctgaaaagaatagggagtgcaagttatctgtgtttattaagtccagaatttttgtgcattgtttaagttggggtactctccatggtttaatcacactacaaaatctgtgataaaaaatactataataataggatctccagacaagaggttgtcaatactagctcatgactggtaccagtcattgaggagtttttacctctcctcaacttctgacttttccatggtggagattagtaccttcagtctacaatataattataaagagccatagttccggggatgggggacttccagtttctttcccacagctcttacagttctaaccattagccaattcatgccctggcctccaaccctttcattctaattctttcatagaatgagaaaaagtcataaatagtgccagatgctggaagatgagactattttcctcaaaactcctgtagtttttctggaatgatattacatgtagcaactgactttattttcctcaatattactatgcaataaaaacttatttctgatacagatgagtcagcaaaagatttctatggaagttcattgggaagtactctctgtaattatagctgagaggaagcaggaaacaagattgtgcaggagaagcagaacggcagtgcagctgcaacagcagcctcagtgaaatcatgggaagctctaacttgtacccaagcaagcgatcaggactttaatactcatgttaaccagtcattagatgtgggctgcctctgagaaagggtcaaatctttgagtgcagctgtttcctttagttaaggacaattcccagagagaatcacagctatgagccatctgcatcccatactctctccaactgaagaaatgaatccgttgttcattgttcctgaagggggatgggcaacataacacagttctctgtatatcttactacctcacatacattggatcctgggatatactcaatatttgttatcttttctgtgtattgctatcacatatggatccctaatgtgacaagtgtgaatccagaaaatagttacatacaatatgatatttcaaaatgaaattgtaacttttaaattttgtaaataaacattatttctctacacattaaggaatagagagattgacaaaagttttttttctgtgaaatacattactttattcagagattctgttctatatgtactcctttggtgttaaaaatatattttaaaaatatgtaatataggtattaaaccacatatttggccatttttcataaatgacaacatcatgttaatctctacacattcaacttcttcctaaatacttccacttggctgtctcacagcatctcaaaatcaataggtataaaacttcgctcatcatcttccaccattaaatctatttctcttataatactaactcttttgtgggatgggggggagtgttaatgaaattatcattgccatctattgtcactaatgtccaaaacttttctgtttattttatatgcctccatctactctcctacccaaattcaataagcacttacttcctctcaattctacttagaaaaacaaaccaaaaaacctactacttctgaccatactgctccattttcacttccctagtttctttaggtctttattttttctcatgtatgttattgttcaaacccttcttcccagcattatcagagtaatatgtacttttttcttttaaaataggaataatgcttctaaaaatcaaatatgatggtgacaatttatatttccacatttaaaatgtctcctttcctcattaagttcaggcaactcagcagggcatattcaagacctttatcacccatgcctccttttctctgggcttaccttccctcattcccaagccctccctcaacttcatcaatacagaaactgaagatttgcaaaaggccttgttcttgcataccatattacctctgcctgcaattccccctcaagccccatccatctaattcttgaacaaccttccaaggccagctcaagcatcacttgttctgggaagtctttgctggagtccaaataaagaaatagaataaaatgtgacacatactttgacacacactttgagggcataatggaagcatggaggaggggaatctaatccatacttggcaggtcaagcagggtttagagtgtgtgatgcccaggatctgaaggacaaaagaggtggctcagaaataagtgctggagcagagtggtccaccaaaggaaagtgcaaaagcaaagaccttgatgctagagatcagaatggatgttaaagaatttgaccttgatcctgagaaccactcattaaataagagaatgtagagagttggttagagttaggaatgctggcagttgacagagcagtatggagtctgtttctatagtccaaattaaagatcacagcactcaagctaaaatagtgcaagtggtgatagaaataaacaaatttgagagacttcagcatacatctttcaacaaaaaaagaaagaagaaatctctggtaaaaataagttttctctacgcttctttcttctttgcttaaataaaacaaaccaacttttctttcctagggaccattaaatctccaacacttgcccccaacctctttggcttttgttaacatgtggtagaattccttttattacattttttttttttttttttttttttttgagacggagtctcgctctgtcgcccaggctggagtgcagtggcgcgatctcggctcactgcaagctccgcctcccgggttcacgccattctcctgcctcagcctcccgagtagctgggactacaggcgcccgctaccacgcccggctaattttttgtatttttagtagagacggggtttcaccgtgttagccaggatggtctcgatctcctgacctcgtggtccgcccgcctcggcctcccaaagtgctgggattacaggcgtgagccaccgcgcccggccttttattacattttttgtgaagaaaaaaaatacaaagttgacccaaaagcaaagatataaagttctggcatagagctcttaccattaacatccatatttcatcaaaataggcagaaaccattgccagatacctctccccacatgtgcctttacttacaattgctctgcttttctttttctcctttctttcaagaggataaactagtgaacatatgaaaaaagtgagaggggatattaaagctatcattcaaatttcatatctgttcagaagactacaggtgtctattcaaagctgtgccacactcaggagtaatctccatttaatagtgtgtcaggtcttggaaaacaaccaagggcctgtaactaaacagagcacagctcttctgaagagtgtcactccaccactggtgctaccgcctacgttcccttaactctcctcaaacagtgctttgactctttaggcatcgaccctgttgtactgtactcgttggatacctgtctagccagggcttctacctgttacccctaaccaatcacatcttgaatttcctccaatctattttattgtaatggaaggagtaaaagtattttcataaatttaaacaaagtttgagatactatatttaaaaactaatgcttcaaaaaagtaattatatttaaaattttagaataaagctttttttaaaaattccagtatttacatccatttctactgtccctctgccttgtcttgttttaatttcatatatatttctgaaataccatattttctttctttttctgttactttaatttttaaatcaaaagagaatataacacaaggttatatgattaaaggaaggcctttctgtatcaggtgtgccctttgcataagctaaataaatatttgtggacaaaaatcacaagtaagcaaaaaaaaagttcccacaaaacaattataaattgttgaaattatgtctcagcaaaaacaaaaaaaaatttttttaatctgaatcagatctgtgaagtttactaactgaagttatctccttgcaaattactctaatatataaaacagtcagaagtggttgtttcagctcatctacagatggaccttaagtctgaacaccagcaaaatgtactttccgggccaggcacagctgctcaccctgtaattccagcactttgtgaggccaaggcaggcggatcccttgaggtcaggagttcgaggcgagtctgggtgactggtgaaatcctgttcctacaaaaatacaaaaattagctgggcgtggtggcgggtgcctctaatcccagatattcgggaggctgaggagggagaatcgcttgaacctgagaggtggaggttgcagtaagccaagattgcgccattgcattccagcctgggcgacagagcaagaccctgtctaaaaaaaatacatgcacacacacacacacacacaaacacacacacgactttcccccttgcttcgaatgtaaagaaactgttaatatcaaaaggttttttagatcacttcgtataataaaacattctacttattttgaacaccaggtggcagtaaatgtggcatttagccaaaaatgaaggtggaaggatgaaactgattttgaattttatgcatgaaaaggaataaaaaataatttagtacaaactttcctgtttacagaggagaaaactgaaatacatagaaatgaggagacgtgctcagagatacagtagtaactggcagatcagtaaatagcttctgtactctatccacgatactgtgatgcaatttaacttttctgacatgtttgatttcaactctacaggtttatttgcaaataaatggattactgagagatttatttgtttaatatttattttgttctacgtgtaacaaattttattttcaattcatatatataatgtaggtggccagtactttcaaaatgtatgtattgcctttaggagacatagaagagccatttctttatggagatagtgtagcatggtgcttaagcacacaggatctggagccaacttatttaggttgtcaccttggctcttccatatattagctgtgtggccttgggccagttgttcagcccgaaaaaaaaacggggattataataaaatcacctacctctaagagttgttggctaggcactgtggctcatgcctataatctcagcacttggaaggccaaggtgtgaggatcacttgtgtccaggagttcaagactagcctaggcaacacagggagatcctgtctctacaaaaaaataaatcaacttcaccaggtttattagtctgtttttacactactataaataactgcctgagactggataatttatttaaaaaggagggtttagtggactcacagttctgcatggctggggaggcctcaggaaacttactatcatggcagaaggtgaaagggaagcagggaccttcttcacatggcggcaggagagagaagagacaaaggggaaaatgtcccttataaagccatcggatctcctgagaacccactcgctattaggagaacagcatggaggaagctgcccccatgatctaattacctccctctctcaacaggtggggattacaattcaagaagggatttgggtaggaacacagagccaaaccatatcaccgggtgtggtagtgcacacctgtggtcccagttactcaggaggcgagatgggagaatcacttgaacccaggaggttgaggctgcagtgagatgcgatcatgccgctgcactccagcctggacaacagagcaaaaccctctctcaaaaaacaaacaaacaaacaaacaaaacgtttgttatatggattaaatgggtcaaaaaaataaagtttattaatataatgcctggtatatgttacaacttcaataactgttattaatctcactggcaagaaacaaaatttcaagagttaaatctatgacttttccgaatattttatgaaatcatgctgatcatttttatacagtattatttttacatggtattaccattcaacttgtcttctccacatttcacatgacaatacattttcagaatatcaacaggtttttttgagtgtaaataaattcagactttgctaaaacatgcctctggtttaaaatttaacatatcttattagacactacgcaaatatattctgctttttaaaatttttatttttttttattcttcgtcagtaccatgaaaatttgagtctatttactgaattgcttaaaatacggcaacgtaaaagtagtaaatgcaattaggctgaaagtaaaagaaatgttagaaaaaaaatcttgcagcaatggtaatcaataatttgaaaattttgatttaaaagataaactctaactcagcagtccccaatctttttggcatagggaccagtttcctagaagaccatttttttcacagacagaggtgggagatggttttgtgatgattcaagtgcattatatttattgtgtactttatttctattattattacgttgtaatatataatgaaataaatacacaactcaccataatgtagaatcagtgggagccctgagcttgttttcctgcaactagaaggtcccatctgggggtgatgggagacagtgagagatcgtcaagcatcagattttcacaaggagcacacaacctagaccccttacatgcacagttcacaatagggttcgcgctcctatgagaatctaatgctgccactgatctgacaggaggcagagctcaggtggtaatacaagccatgggaagtagctgtaaatacacatgaagctttgctcactggcctgcagctcacctcttgctgtgtggcctggttcctgctgtggactcctgctctgactgattattacttttatgataaaaacttgcagtgtgagtatctttaagaaacttagtatttagaatgtggatttctataaatagcaaactagtcttttacagctgcattgaagacccttgggccattaggtctctgtagacctccctggcctcacttctctctaaagcccctttaaaatcttcagaactcttggtccacaaactgattctatccccatcattgctttaaaacctactaacctggaaagaatcagctatcaccacatcttagactacacattcaaatttgccaatactccttcttaaggtaatcagaacaacaagaaaaacaccattattttcaaactccatttcatagtacataattaaactttcaatttagtaaagataatggaataaataaatttaaatagctgttatctcctttagagtaacagcttgggaagttatatcttgtatcattagcgatgggtttgctgaaatatttttaaatgtctcttttggaactatcttgaggacctatttatgtcttttttaaaattaattttcttttcttttcttttttccttttttttgaaacagcatctcagtctgtcgcccaagctggagtacagtgacaagatcagagctcactgcagccttgacttcccaggctcaactgatcttcccacctcagcctcccaagtagctgggaccacaggtgcacaccaccgtctctggctaattttttatttatttctttgagagatggggtttccctatgttgccccagcaggtcttgaactcctggactcaagcaatcttcctgcctcagcatccgaaagtactgggattacaggcataagccactgcacctggccatatatatctttgagggaagaaaaatttctgatccttgagaattaacttaataaatgtaatacatgtatgttaaatgaatatattgaaatatttatttaaagttacaaaagatcacagctacctataaattattataactgtttaacaaatgttgcattaatattttattgtttcaaatactattaatgacatatgtattcatataggaaaataaaagtctggaacaatagcagtcaagctgttaaaacaggttgtgaattaactttgttgttatagggatcattagtttctattttgaatgtgtatatatattccttaactactattccgagtgttgcctttacaatacattgaattttcatttctgatattgtattttccatatgtagaagttccatttttgtgtgttatatcttatatttctctcctcatcatattcagatttttctttactgtcttaagtatacatagccaacttaatattacaaaatttaatgtcctaatttgttaattccattatctttgtcatttctgggtctgtttttgttgattgacttttctgcgggctctagctcatattttccttcttctttgcatgcctgctcattatttttgattggatgccagtcaatgtgaattttacgttgttaggtcctttgagacgtgttggattttactctggctaacatataagcaaactgaaatcacctgggtccttttaagcctcacttttaagctttgttaggataaatccagagcaacgttagttaaagttaattcagccccactgctaagataagacccttctgcagagtctacccaatatctcctgtgttttgaggtcttttcactttgactggggaggataaaatattactatccctgtgtgaggtccaagaatttttaacctgctacttaagattacagtcatgtcagtcatgtgccagataacacttcagtcaaggacagactgcatatatgatggtggtcccacagattataatactgtatttttactgtaacttttctatgtttaggtatgattagacacaaaaataccactgtgttacaattgtctcagtacagtaacatgttgtacaggtttatagcctagaagcaataggctataccataaagactaagtatgtagtagactataccatctaggtttgtgtaagtactgtctctatgatgttaaaattgcctagtgacacatttctcggtacatatctccattgttaggcaatgcatgactgtagttctttctctggcttagggtatttttgttttcacacaattgcagaatgctgtcaagcaaaaacttgaggtctctttctacagatctctggtatactctctgttcagctcccttgtcttaggtgtcctgtcccaaataaacaaattctagctccctcagcctatcaaactcttattttctggctcttcatgtttccatcttcctgagctgtggtttagaaactttgtgtagtatgcagagacaatcacagcctcactttctttctcttctctagggatcactgtcttatagataatgttgcccaatgactgaaaactagtgtttcatatattttgtccccttatctaatggaagacttctacaagggaatgtcgataacaatagttttgatcaaaaataactccacagaaagcacattatcagcaaaaccattgttagggtaagggacccatcagtggactatgacactggggaaaattcttcaggaataagtaatcaattaatatacttactaagcatctactacatgcaagacaaaacatttatttttcttcacatcagttttctggccaaaaaaatccagaccacgtcaaattagacgagcaaacactcagatgccaatacatttaggaaacctcttttcttcagttgtttcattaagcatcatttgcccatctcatcactccaatctatgtctgataatcttcattgtatattctatttctttttagttataatttgaagttctacttttgaatcctactttttagctatgtatacacaaaacttgtaactttattcttctattttcacaacagaataattgttttttcttactttgtaatattgccgtgcagccaatattagaaggtaaaagtatttttctaatcctatttaattagagaaaaacaaactctttcagtattgtattaattttattgccttaatattactgtctattttttgttcttccagaaacttctacagttttgaaaattgcagtggcaattgtggaaaatacagaagtgtggatatccatttatttctcactaagggaaataaaattcttattcctattctggtatggattgtatgatgttagttaatttccatgactcaacatttccacatttttctatctaagttacggaaggtcagttgtaaatatgattaggaacttattggttattggctttttcaaccagacaggctttgtctggttcccttaattcaagcctaccctttaaattttaaacgtaccatctacttatgtctacatctgacgctgtcatttagtgtttaatgaactctcaaggctgtgcagtgtagtatttaataagaaatttggaaagatactttttctgggtttaaaccaagataaaatttctagggctgccaaaagagcaagaaaaacacaaacagctaatgttctgtagactaggaatggcacataaaagaaatggaaaggaaataaatagttggaacatgaaagaaaattgggaaaataatgaataatatacctaatgctttgcctatgagctcacagggaaaatcctgcaagggatccctcagtcagaccaagaggattttatttttggttttatcattttccaggattttatgtttgaagatctctaacaagaacctagatatattgagaatagtaagttcttgttaatggatgcttaaagtggaatatataatatgttatatattatatacaacatatgtattatacataacatatattataacataatatagtaatataatatataacatgttataatatataggttatatataatgtataatgcattatatattccactctaagaatgtatctaacatatgtgttattctagatataacagcaaaggcataatctataagagacataattgctaaggtgaactgcattaaaattaaaaacttctgctctgcaaaaacggacaacaagccagtgttagataaatatttgcaaaagacacatctgacaaatgactgttaaccaaaatatacaaataaagcttaaaactcaacaacaagaaaagaaataacccaatgaaaaaaatgggccatataccttaacagaccaaagaagatgcacatattgcaaataagcatataaaaaggtgatccacatcatatatcacaggggaaatgcaaatcaaataacacttatggtatcaacaatgggcatgagataccaccacatatgtattggaataaccaaaatccagaacactgatgatatcaagttctggccaaggatgtgaggcaacaggaactctcatgtattgctggtgggaatgcaaaatgctccagccactttgaggacagtgtagcagtttctttaaaaactaaacatactctcaccatatgatccagcaattgtgctccttgatgttcacccaaaggacttgaaaacatgtccacacagtaaccttcacaaagatgtttatagaggctttacgcataattgctaaaacttggaagcaaacaagatgtccttcagtaggtgaatgaataaactatggtaccaccagtcaatggaatattattcagcactgtaaagaaatgagctatcaagctatgaaaagccatggaggaaaactaaaagcatattgctaagtgaaaggagtcaatctgaaagggctatattctgtattattgcaactataggatatcctggagaaggcaaaactataaagacagtaaaatgatcagtacttgccaggggttgaaatgggagatgaataagtggaacacagagaattcaggagagaactgaaattactctgtaagatactgtaatggtggatacatgtcattatatatttgcctaaccccatagaatggacaacaccatgagctaaccctaaatgtgaactacagaccttgggagataatgaaacctcaaagtaagttcattaattttaacaaatgtttcattctggtggggaatgttgataatgggggaggctattcttgtgtgggagtagcggttatgtgggaaatctctgtaccctcccttcagttttgctgtgaacctaaaattgctctaaaaataaaattttaaaaataaaagaatgtggcattgcttgcatctaataaaaaagaccattattcctattgcagttgaactcttcttcctatatctaccaccaatcagggaagagaaggcgatttgtccaggatatggcactgagaattatcacaagtgagctagttcaccttcattgcacagtctcagtcactgaagtttccttccttcaatagcacatcttacaagtcaagaatgtaaggtccaaagccccaggacaaatctcagaagcaaagaaagcagcagggaaaagtagaccctgggatttgatttccttccggttatctctaagcatcatttccatgatagaaggtgtggaagcaaataataaaagtgcccgtcactagtgtttatcctgcaaagtggtctgcccttttgagaggcaccctgccctatggccatcctttgatttcttcccttggtggaaatttcctgtttctctttgagaaagataattcaaccctgtttccattgttcttcctcccaggctgctgtaggaaagcgcacgcacacactccacacaaaatgaatttttaaaaaatttattttcacagtcgctcctaccagctctgaaattcagaacccatatgactgatggcatattcagataatcgggtcccaggtctggaaaagcagccttttccccacgtttctttccccacctaggacctcctctgattcttcactgcatcttcgaaagaaaatgtattatttgcttgcctggaagacgctgcaattcaattgattttatatatacatatatataaagaaaacagaaaacatagcctagataccggtcttgagcgtcaccgccccactcgcggttgtgagcaaagccctacggaagaaaccaattcccagcctagactcttcagagcccaaggtcggggaggcgctggcctggcggtgttgtctggctccccagccactgccccagactcagggctttgccattggtccccacctcctctgctccggagtttttctccagctccccaccaagccacacaaagtgacttctcggaaacattagccgattctgctgagcaggaagggaggaaagggatgatgggggcgggggtgagataagggaagggctcttctggctgctggacacacacacacacacactcaaacacacacacgccccacccaatgggtggccgtggatggcaggtcgtgcaaccccctcctccgccttctattagcgcatggtgcagaggctacagcgtcgccaccaccgcgcccctagctgggtccccgccctgcgccgcccgcaggagtggagagagggagggagggagggagcaaggggtggggacccgggcgcgctgggaggagtggaggaggcaaagcggcgcagctgccctcggggaggcggggctgctacctccacgggcgcgccctggcaggaggggcgcagtctgcttgcaggcggtcgccagcgctccagcggcggctgtcggctttccaattccgccagctcggctgaggctgggctagcctgggtgccagtggctgctagcggcaggcgtcccctgagcaacaggagcccagagaaaaagaagcagccctgagagagcgccggggaaggagaggcccgcgccctctcctggagccagattctgcaggtgcactgggtggggatgatcggcgggctaggttgcaagtaagtgccttttcttttgctgcttctgtggggaggggaggagaagccctcggtctttcgcccgtgctcgcctcaaccgccacacccacctgtgtctattttcacatctcggttctggaaccctgtattacgccacctggaaagaagagaggggagaagcttgaccgggtggttccagcaatgggaggaagaagggctggaagcgtagttatttcgatagctgggcagctcctgtgcggttttgactctgtgggtttgctgccaggttctgaaactgtggaaaggaagggtagcaatgcctggtggtttactgtcttttatttctgtttacgctagcagagttgttagatggacttcaattcaaggggcagctcacattttttacgagcaaaaagcatgtgctgtatttcccatctgcaaagctgagcgtgcagaaccagcttagcagatacaacctgtggggacagaaaagaaccccgcaccccttaagagcacacaaacacaaataattgacaggacagctctgcccctatttctcagcgcagattatttatttattttttcgaataagcactttatagtgaaattcagaaaagatgcagaatccttttaactttttatcgaattcaacttgggaaactcatttacttttaggaaaaaatggatattttcgtgccttatattcaagacaaaaatcagaacaagaaactagaaacattaatgccagtttttgtgattatagtaaacatttcactcattattttagttttttttttttaagttggagcgttcatagattatatctactctgatgttaagagcaatttacatgagaaacttaggggggtttttaagaagctagtgtcagtaagataaaagccaaatcaaagtaagctttcaaggaagtgatagcttgtcagttactgaataggaagtcagtgttgggaagttcagttcttttcagaaacatatttattattcttttctatttcttcttccctgtagacaagataaagattttctttctctttctttccttgttatttaaatatattttataatttttgctttaacatcaatataaacctattttatataaactgcaaaccaaatccaattattaaactgttcattttattgcaaattcttcagattttttccactatttaaaaaagtttataattttttcttataattatggtgagattttttaaaaattattgattagtttgaaagctagtcttatctgatccctgtgtcgcaaattttcatgattgttagactagcttatcaacaacaaaactctagacagaatatggtatttgatgtaaagaagaatgtgccctctatttaggcaactgatagtttggcttaagacaagttttttaaaattttgtagaggtttaaaaggaggtttccttaagtaagccactgtgcagttgtgggactcagtgatgtgtttttacagtgactggatatatgatatgccttgattcctatggtgcagggctaggctcacagagtacctgatgcttctacagaagaaagatgagtcaggtctggctctctgccaaaagcatcttgggcctcctttcccctagggcctgcatataatcatgggagcccttctgtggtaatgcttctatgtttttactacctgttgctgtgctgagtttcagaagcaaaatagataaacaaataaataaattcagaagagcaatcagtagggttctatttatttaatataatcaacccactttctctgtggcaaggaaaaaagtagaatttttcattttacatgaataataaaatctattttttatccaatttctattcctattagttatgcaaaagagtgtgaagtgctagaaggatttatatggtacttttctaagacaagtcatgatcttgtaaaagagcttaaagtttattgatgtaaatggaacattctagatgtcataatgataataatttatgactttccctaaaactctgtctcagattctttcctcccatcttcattatctgaataaatgccttcaccatccaagtattgaaatcacctttgattgctctcttccttattactccatttcagccctttccagcctgtaagtagatctatcaatcttatctcccaaacttatttctatttcatcatacgtctcagatgcctctcattcaccctcttttctgtatctacacggccaccaaattagttcaggtcatcatcataatttacttggaatcctgccacagcctccatatcaatctctccacttctgtaattttctcccctgcaattcattctctatacaaagcaataccatcctgtctcccctaacaaacattggctcacaactgcatttaaaaaaaaaaaaaaagaggaagaagaagaggagaagaagaaataaacatggcaacacagagaccaattagcaacaacagtaaatgcctttcctcagcatatggtttactctctgttctgtcccttctctccaacctcaccagaacctattctcttctcattaaggtgctcctgcccaggtcgtggctaaaacacatgaaacaatagcactctttaaggccttttcaaatgctgttcccaatgcctgaactctatgcgtgcttactccttcttaaactttaaatctcaactcgaggtttttttgttttggaaagatcatttttgatcatcttgttaaaagtaggttgtcccgtgttggtcttgatgttggaaccttgtttctttcatactgcttgttacagcatgcaggtattttgtgaatttgcataccaaatactccaagggaacccagactatgtcttcattgttgacttagcttccagaatagtgcctggcatcaagtagtagggggttcgtagatatttatataaataataaaatacaaaaatatggattcttccagaataaagcatattaaccctggaaacatgaattttgtgattctattttttatttgtcaagcatttagtatttttacaatatcatggtatgatattgaggaggtaaaattaaaatatcctgagatgtattctctcttttatcagtgtaggtgataatgtacttaaaggtaagtaatttgtaatgcattcttagaaaggcagtgaccacaaatgtattaaaatatattttaagaaaaaattggattgcataaactaatatggttataagtgactccaaatctaaaatgataaccttgttaggtttaaatctgtatcatctaacagaaatttgagggccagtcaatagtcactgactatgaatttaaaatattcttttaaaataaacatagatgcttatgtgagctcagttgatagaaatgtagtcagatgaggcggaggccataagttaggtttccacacggtctaaattgatgtttgccccaggtacaaagggcacattatccaaatatttgaagcattctctaaggaaggttcagagaggcaatgtgggcttatccatgaagacccatcactgttattagagtggaagtaaggactgcaaacttcatgctcataaatgattgtgtcattttcatactagaattttaccacacacacactcacactcacacacacacacacacacactttgtatggtgatttgcctcccccctttatttttgcagactatgcttaaagatattaaacaaacaactagttttgctattaacatttggttgaaaatttagctttcaattaggtgacaaactgattaatgatttttttatgtagcaaatggccagccacagatttttggtaaataatttggttaccacattacatcttgaaggactaaattatttcactaattgtgagcagggatttttaaaaatttgctctgaagaggacatattgtggatgttgtattggagggcatctgtgtactaattgaagatggtccttcatattacacatcacaaattagctaatttattctttacagaagtattatgacatcttcctttagaactgtgtagagttagattaccacttgagaggcaaggtcatattaaaatagatattataaaattgtataaaaatattttatatgaggatttatgagagcatccagagaatgtgggtagaatacttttgtggaatatgagataacaattttggtgtcctgccattctaaaaaatgaaatttcttcattgaaggtatcacttaccctttcctctgccttgctggaaggaaatggctttaggcaaaagaaaaagccatcagctcttggcagctaaaggtggaatgaagtttggaggaatgaaacccttctgggtggtgaggaaaaatgccaggccatgataaagtggggaaggaagaggggaatgccttgaacagtgccagtaagcataatctgccacagacaagtttgaattgacatatgtagaactgaattattctatatctttttagttctatagagaaaaccgttctttccacgtctctttttaaaataacaacttactgtaagcaaaaaatatgttgttgttgtttctttaacacaggagatgaactatctttagattttttaaagtgatataacatggagccaaaaatgccatatattactgttgaaacctaacgttactttaactgtaatttccttgctattcattttatgatttcctcttgttatgtcaagtgttagagagactgctattactgatcataaatttctttaaaatgtctccttggattttttacaaagctttctgaatcatttatcaaaatacaataaagctctaattgcacctaggattgttcacttggaaatttagaaagagtgtgtacatttacaattaagttagcatcctgccctgcaatgaatgccctttttctttttttttttccttcttctctcctacatctcatcttccaaatgtttgatatgtacgccagtaaggcaaattttactccacttttaggtcaaactattagtacaaataattggaaaattgagcctctaaagaaagataaataagattagaagcatgcattaaaatataagtattaaaaacattcccataagatttttaataaaaattttatgtgctatatgcacacctagactccctgtattatctgatttttaaagattcttttttttttttattttttatttttttgagacggagtctcgctctgtcgcccaggctggagtgcagtggcgcgatcttggctcactgcaagctccgcgtcctgggttcacaccattctcctgcctcagcctccgagtagctgggactacaggcgcctaccaccgtgcccggctaatgtttttgtatttttagtagagacggagtttcaccatgttagccaggatggtctcaatctcctgacctagtgatccgcccgcctcgacctcccaaagtgctgggattacaagcatgagccaccgcgctcagcccattatctaatgatgatgatgatgattattattattattattattattattattattattattattattttaactgggggtaatttcactggatgtggtatctgtcaacttttactagttgctcctacactatatgtttttaaatccaatgtaattattttaaaaatatgtcatcttcttgagagtctatactttagaatttgaaaaaagaagtaaatgtagatattcaaatccatgcagatgagtaaaacagggaaaaatgagaaaaatgtttcatgataataaaatattatgtcaggcacagctggtcacccctgcaatcccatcactttgggaggccgaggctggaggattgcttgatccaggagttctagatcagcctgggcaataaaaggaaaatctgtttctacaaaaaaattaaaatttatatttcatatattgatttaagctctactaaatgactattctttcaagtctaatagacagtgtatcttttagggctcagagtaaagataatttattgaggacattttgaataggatgaattaaatgctttattggtaagtgatgcctttatctgagtgattccttctaggtaaatattatgggaccaatctttgtaaatgatctttgcatggaacaaaatattataaagttgaagtgatgaatttgtttccctcttaacaaaatatgtattcttgttaccccatttacaaacttggctcatggtaattcaggtaggaaaaagggaagtggcctactcagggatcaactgggaataaggttcttataatcccatgagatcagctgacagacttttaggaatgaacacttgtagaacagctaggcagagaagtgcctttcaaaatttatattacatctctactatatttcagactgtaaaatatttttataaagtgttaaaagcacagataaataaatttgagttcaaattagtatagtgaaaggaagtttatttttcccaaatatttcctttactcagtatgtggtcttagtcaaatattaatttcttaaatattgctttcctgtaaattagtagtatttacttctaaggactatattatatgttatatatagagtatattatatattaggagatatatatgtatatacatcgtaatttgttttttccaaaacagccactttagtgtcttacacatgataagtagatatgagtagatgttcaataatggtatctaggcatttaataacttagaatattataatcaaaatgcattcttttttttttttttgagaccgagtttcactcttgttgcccaggctggagtgcaatggtacgatcttggctcactgcaacttccgcctcccaggttcaagcaattctcctgcctcagcctcccgagtagccgggattacaggcatgagccacctcgcctggctaattttgtatttttagtagagataggatttcaccaggttgggcaggctggtcttgaactcctgagttcaggtgatctgcccgcctaggccccccaaagtgctgggattataggcgtgagccaccatgcccagcctctttttttttttttttttaattaagtttcaaggtacatttgcaggatgtgcaggttttttacataggtaaaggtgtgccggtttcactctgttgcccaggctggagtgcagtggtacgatgttggctcgctgcaacctctgcctcccagattcaagtgattctcctgcctcagcctcccaagtagctgggattacaggcatgtaccaccatgcccggctaattttgcagttttagtagagatggggtttcaccatgttggccagactagtctcgaattcctgacctcaggtgatctgcccacctcggccttctaaagtgttgggattacaggtgtaagccactgtgcaaggccagcaattatgctgttacaaggaaaaatacatacggaaaagtttacatcttgctaacattactgataatattaatgtaacagtcttatgtatggacgtctccttaatgctaactgagcagtttgttaagggattttcatatgctccgtttaaatcctcatgaccaccatttgaggtgagaacactaaggctcagaaattacctaacctttccaaagactcacaatggttactaaacttgaataacatacacatttcttttataggaaagaaatcttatatattccaagaatacgtttgcacataccccacacagatatacctggtggttacgctaccaagcattctatcaaatatgtttaacccttaatggagctaaaataaaattacatttgcaatcaaacatactaaatcatgtaattacagctaatagaaaacaacaaaaaaagaaagatggatgactgtttcaattttcttcttggacaccaattcctgaggggtatattgtgttaagtcaaaatagagattttggtggaagtttgaagacattatgaaaagagtacctatgcatttaaagtgtttttgaagttgttttataggttgaatgacttcactttcctggtctaggagtattattgcactactgtgacttgactttgctatgattcgcatattttgttttaacattaaaaaactgaaatgggaaaaaggccttccccaaggtagaaaagatttgaaaaaagaggaatggtgtaattaaaagggaaatatgtataaaatgtctagggtgggccaggcgcggtggcttacgcccgtaatccagcactttggaaggctgaggcaggctgatcacttgaggtcaggagttggagaccagcctggtcaacatagtgaaaccccatctctactaaaaaaaatacaaaaactatccaggcatggtggccagcacctgtagtcccagcttctcgggaggctgaggcaggagaattgcctgaacctgggagatggaggttgcagtgagctgagatcgagccactgcactcctgcctgggcaacagagcgagactcagtctcaagaaaaaaaattaaaaaaatgtctaggatgaagtttattctgaaatggagaagaaacagggaatgaagttacacacgttgagatcctggagctagcagatggagaagtatgaaaagcaaagtgatcttgtgcaggataagatgatggtgttcattggaagtatttatatatcttggaaaataaaaatttagatattctatattggaggagtacaaatatttagagcatcacaaattgatacacacaaatgaaacctaaatcacagtacttattgtcatgaagactcaattatctaagtcagttaaattgtctaacatcagtaatgcaagaagttgacttttaagggttttaaaacagttttggaaaactaatttattttacattatgtttataataatttttgcatgcaatttttttaaatatctattatccacttagatactgtactttgggatataaaaaccatgggaaatttggcccttgagttctatgatacgtctcaatctattttagtgatttgtggattggtagcttatcctctagactaagtggttaaggttttatcagcactgcaatgagataatcatctcacacctgttaagatggctgttataaaaaagtgaaaggtgttgttgagaatgtgaagaaaatgaaagcattgtccactgttggtgggaatgtataatagtgtagctgctatggaaaataatatggaagttcctcaaaaaattaaaaatagaactaccatatgatccagcaattgaaatcagaatctcaaagagatatatgcacttctgtgtttactgcagcattattcacaatagcaaaaatatgaaaacaacccaaatgatcatcaacagataaaagagtaaagaaaatgtggtctgtatataaaatagaatattatctagccttaaaaaaagaaggaaatcttactatttgtgacagcatgcatggacctagaagagacatgctaagtgaaataagtaaagggacacgaaaacttttgacagtgacagatatgcttaacaggtagactggcagataagaaaaaacaaagttaaagctgaaatttccaactgatttatcttagcctagggattaatcattagatccggtctagttggcctccaaaatgtgtaggtcaggagttggcatccaagttggtattggtgccattgaggtttgtagggagggaagacctggcagagatcccaagggcagtggtaagcggctgctgagtccctccaggccagttccaagaactcacaacctcactcctctcagcatttatactcttcctggaatttaaaagcaattccttctttccttccctctttcttttttccctctcttccttcttcataaagttttattgtagacatcagatatagcaatgaacaacacatggagatgtgacgccgattttaagagataatgaagagataaatattcgccactatccatcattgtaccataagatatgctgtgaaaaacaataaaacaggacagagaattgagagaaggaggtattatttaaagtggtctgaaaaattttatacagggtatttgagtagagacatgaagtaaatgaaaaactaagggagctagctaaacaactgaagaatcattctagtcacaaaaaacagcaattgcaaaagccctaaggcatatttgatgtatttaaggagaagcaagaaaaccagcatggttgaaatacagacagcaagattgaaagcagaagatgagggtttttcttgattttgtagggattactaacctgcgtcgagggctgcgtgataaaccaatgctaaaattaccagcatgggtacaactttggaaagggatgagtgtgctcttttttaactggatctctttctggacatgggtaacataaaaccagaaaaaaatgtttgagaagtttctaatttctatacaaaaataatgtttttgtctttttttgtgatttagatgtaaatgtatatgtacatgcatgtatatgtatttatgtactgatttactatttatgtatatgtaaatgtatttatatttaaatgtcctatattctcttcctgtctgtaatggattggattcttggaacctcttactatttggggcagggggcagggctaataagacaaagattacaattgagagtaactttaaatgtttgcattttggaaacttaatggtgggagtacagtaatattttgtatatttcgatcaattttgatgtttattatatgattatttctcatgaaatagtggtactgcatagatataaatgactactgcctagcaaaacagataccaaggagacaccgcatgttgtcagggttgaccggttgctaactgctgtgattttgttctcttactgactctttctgccttacggatctcaaaacacgctagtgaatttaaaaatttatattttggtaaaatatatataacaaaatttaccattttaaccatttcaaatgtacagtttagaggtattaagcacattcatgttgtacacgatcaccaccatccatcttcagaacattttcatcattccaaacaaaaactcggtaactattaaacaatgactccacactcctctcttcccctatcacccagtaaccactattctactttctctatgaatgtgactattctaggtacctcatgtaagtggaaccctatagcatttgtcttttcatgtctggcttatttcacttagcataatgttttcaaggtgttcatccgggtcgtagcatatatcagaattttattcatttttaaggctgtgtagtattttattgtgcatttatacacattttgtttatctgttcatctgttgatagacatttgggttgttttcactttttggctactgtgattagtgctgctatgaacattggtgtacagataactacatgcgtcccttctattaattgtttaggatgtataccctaaagtagaattgctggatcatgtgatatttctgtttaattttttgaggaaccaccacagtgttttccacagcagctgcactattttatattcctatcagcaatgcacaagggttacaatttctccacacccttgtcaatgtttcttttccttttttttttttaaacaataaccatccgaccaagtgtgaagtgatattttattgtggttttgatttgcatttcccaaatgatcggtgatgttgagcatcttcccatgtactgattgactttctttggaaaaatgtcttttcaaatcctttgttcatttttaatctgcttgtttattttttgttgaggagtaggaattttttacatattgccaatgttaatcccttatcagatatatgatttgcaattattttctcccatcatatggattgccttttcactttctagtagtgttctttgatgcacaacagtttcaattttgacaaaatccaattcagctctttttttcttttgttgaccgtgcttttggttccatgtccatgtgccaaatctaatgtctcgaagatttttccctatgatattttcttagaaatttacagttctaactctgacgtttaggtctgtgattcattggtgattttttaaaaattcctatataattcgtagactctaagagagtttccagctttcccatacccattgtccccagagatctggtttttagtctgaatgtgccttactctgaacatgtgccttccatttcaagaactcccatttcattttgttttgttctgttttttcttttataccagtattaaaacttttgagttgttgtataaatatactagcaatttaggagaattcctgatgggaaagaatatccttgcctagctagttaatgaatttagggacccttcattttctaatcctagatatgattaaatcaaacaaggattcattgtgctgtagttgtaatccacacagaccattttacaaggctttgcacagagaaggtgcttaatacttgagtaaacaaattgaattaatgagtaagaaagaaaagctatcttgttttctcaacggtcaagtagatcaatgatttctactatttagaatcttagatttattttaataaagcaagttcaaaaatctcctctctctgttaatttttagtaaagtcacttatttttcactcagttttgttaaagtgttttcagaagagtttgttaccgaaaactgaagttttaaggttagtgtttataccacagatatttcttgtttttagacaatccttgtggaggttaagtcccctaggcaataccttttcccactggggagttacaagcaaatgaaaaatggtgactatttatggaaactccaggtcactaagtaaattttgcattttcatgaaaatatgacatatggacatttaaaaaaatgaacaggtcaattcatcagttagaataataaaaagaagtctgtaaataaaagttaagcacctttgtcattgaattgttgtgaaccgtttttgcctatgcacttgctttatctcagaatccaagcctcctggtcaaagttatattcctaataaatttaaaaataataatttaataattttaattccttctggaatataaatttgatcaggagtcttggattctgagataaagcaaatgtttaggcaaaacacttccttctggaatataaatttgaggaaggataggaattattttcttcctattcatttgtgatcctgtgattgttatctaatttggaatattcttcatgactccaatcctatttatatctgtgaggttctgaaaattctgccccaaaatggcagaaagtaagaaatactatcacacatttaattcacccttaaaaaaatagccataccctttatctttgaatatatttttaacaacaacaacagaaagagaatgcattttaaacaatatcacatgagtttcatcatattcccagattatggtgagggttcctagataccttgccataatcacagcctttagttccaagagagagcagagaaataagaaacacaggaagtcatatctatgaacatgttagtttgcaaaaggtttgttagtaaactcatgttatttataccatagtactttaccatctccagatgaatttccactaaataaactgttcctttagactcctcaaaccagattacccccttcctttgctaatatagattctcaaacaatgtcttcatcaaaaatcttatgagtagatgtcactagttttgacaatgtccacaaatgttccaaagaatactttggcatgcatgcttcttaactcacttattttgatattgaattaaagggcttttaacaattcctgccccatcaggaatatttcatcagcagctgttactgtgcttggattttgccttcttgaatgaatacctagtcttttctcactttagcattaagttctggagcatccgctgctaatgaaaaatcctctgactcatgctagagcattttcatttttttaaaaaaacaatgttccttgtatcttgctggctattgcctaagctcattattttaaacttttgcataattctgctcagtcctagagggtcatcattactgtcaatgattaaacttttatgcacttgccacatttattattttcttactttcgatcattttattatttttctttggttcccatgatattccaatgtttttgttattaaatctttcaacatcctcggtgtgttcagtgtatccacatttatcaaacctgatggatttaagaatttatataaccttgaaagcaaggcccacatcctgtagacactgaataaactaatgaactttgtattggcaggactaaaatggctgtgtgtggcatatattgccacctgttggtagaaggcaatgtagtcttggttttgctataagcatacattttagtctttaaaatattctgagttgaaagctccctaagaagaaaaggttttgtatatgcaatacaaaagcttttctattataaagtaagcaaatatattctcgttcctaagaacattagctttaggtatacaaaatcaacttagaagaaagttgctaaaatcactaataataacagttacaatgtattgtgcactgaaagtgtaacaggaaatgtgctaagttattaaaattcagtgtctaattttttccactaaaataaccttaaaggattatcattttcagctccggtttgctatataagaactgagctttagagaagttaattaaattccccaaggacataagctagtaagcagtagagatgggatgtgaacccatgcctctctcactctggagccatgaatttaacaactgggttatgctgtcttactattttactgcagatctatattttaaattaaagccataaacatgtttggcaagataaaacataggtaacaaatatactccacataagattttcgtaaggttttgtgtttattggccaactcatggcttattatttaaaaatttcagtctgtatagggaagaaggataataatcttgctgttatttatttagcctaggcactgtggtaggcactttaccaaaaccatttctattctacatgataactttataagacagatatatttctctctttcatttatggggaatttgcataatgctgcagagctaattatatggaataaacaggaaattcaaacctaagtctgcctggtgccaaagttattactatgcactttctcctaaatcatgttgatgttttgagggaagtggatacatgtataataatattggaaatacattttctctctaattatttaaataagggtatagaacctgttctgcagccataagtctgtgataattttgtgctctcaataaagtcttaactaacagagagatgggatttaacgtgaactaagaagtattttctgtcttcctttatacatgctgtacagataagactttatgaattttttattaaaacgttcagatatgccagcaaatgttgacactaatcttaagttttcccagggtaatacacttcttaagattataaactttaatttctttttttttttttcttttttttttttttttgagacagagtttcgctcttgttgcccaggctggagtgcaatggcccgatctcagctcactacaatccacctcccgggttcaagcagttctcctgcctcagcctcctgagtagctgggattacaggcatgcgccaccatgaccagctaattttgtatttttagtagagacggggtttctccatgttggtcaggctggtcttgaattcctgacctcaggtgatccgcctgcctcggcttcccaaagtgctgggattataggcgtgagccaccacgcccggcaaactttcatttcttataaacttgaggaatactatattttaaaaggctatacataagactaacttctatcttaataataaaataataaatataatataaatgattattacagggtattatgaaatacccaaatcacaatattttaataatcatagaatttagaaatagtccctatcagttgtctgaatataaaattatcgcatatacagcttaatttgttttgcataccagttgttcaactactataaaatgccataaaattgaatgattttaggacatgaaatattgaactactcttgttgaagttattaaactgatttgccatctaccaaattaagcatttctaagaaataataattattttaagaatttatttacatgattaacataatgttacttatgaaggatgcaatggtaagatttcagcaatcaggcaagtatttaatgaaaagtatttggtttcatatatattgtatttgatttcatatatattgatacacttaacattagaggttctaaaatgagtagccagcctgcctgtttttcttgtgatattatacttggcatactttgtttttataatctaaagaagaggtattaaaaaaagagtcagagtgcttaccattggcagttccttttaaccttttaatttataaagacattgcaatcccaatgaaaataaaaatagaaattttcccatttggaattagataatctggatctagttgggaaattgtacacacataaaagagtaatatctaatagcaccaaccctaatacataatgttattttatgcaaatagggtaattaaaatagtatggtgacctacatagatagttcattggaagaaaatacgatatccagaaatagacatagttacatatgagaattataaaggtagcatcttaaataggttgaaagaaatattatttaatagttatcattgggacacctgggtagtcatgtggataaaaataaattcagattactgctttgccacctaacccaagatacattttagtggaatcaaatatttaaaataacatacaaaccacaaaactgctagaagaaaacatgtgaaggttttgttttcttttttcttttcacctgagatggataatatatcaatgtcattacaaggtttgagggaggaatatctcacatatgcatgtgaaaacccagtcatcacacttatgaagtacttgaagtagaaattattttctaagataatataaaacacaggagccactggagaaaggattggtgaattcaatttaattaaaatgtagatgcttttaaaagataaactaccataaaccaaaagaaacaaaaacagcaaacttacaaaaatatttgtattgtataccacagaaaaaaagctaattttattattttgttaagagttcctaaattaataaaacactgatagtctattaaaaaagtggacaagactacatacagacagagcacagaaaaaaaagcacaaatggcatctgaggatatgaaaagatccctgacctcactcacaaaagaaaatgcaaactaaaatgataagaattaagaagttttcggccgggtgtggtggctcatgtttgtgatcccagcactttgggaagctgagatgggtggatcacatgaggtcaggagttggagaccagcctggccaacatggtgaaaacctgtctctactaaaggtacaaaaattagccgggtgtggtggtgggtacctctaatccgagctactcaggaggctgaggcaggagaactgcttgaacccaggaggcagatgttgcagtgagctgagatcgcaccaaggcactccagcctgggcaatgagagagcgactccatctcaaaataaataaataaataaataaataaataaataaataaataaataaataaaagttttattccccacttattaggctcacaaagatgaaaaaaaatttatgaaatactttattgaaggtatgtgcaaacaatccctgacacattgtttggggagagcatggattgataggcctttatgaaggagttaccaatataccaataacctccttggtagtttcaaaaggtggcatctttccctgtttggtattggagacccaatacaagaaatgggaaagtgagcatcaagcaatgcaagctttattcgatggccaaagaatggagaagtgcaagtatggcgcacaagctaacttcttgactagtgaggagtgaggaaattgaaatagaaagtatatctaatgaagaagttggtcattaagagtgaggggaggaatgttcatgtcttttccagaaataggtggtgaacttcttggaaccagagtgccgccttcctttttgtccttttatggcttcttctggtcattgtcatggggattatcaactgtcatggcactggtgggggtgtcatttagcatgaaaatgagattataatgatgcctgaggtcttcttgaagtcctttagtcaactatcttggttctaagcaatctcagctgctctggttacaaatggaacattttacctgtttcttaaagatcagcagagttagggtaggatagaaattcagctatggccctgtaggcgttacactaggtaacaaaagagaattcggcaatattttattatggcaaattaaaaacgcacatacaattatgactcagcaatttcactctgaagcatttgtcttacaaataaaataccgtactgtgaaactattcaagagaatgtcctcacttataagtgagagctaaatgatgagaacacatggacacataggtgggaacaacacacactggggcccattggagggtggagggtggcaggagggaggggatcaggaaaaataactaataagtacttggcttaagaccttggtgatgaaataagatgtagaacaaaaccctgtaacacaagtttccctgtgtaacaaacctgtgcatgtacccctgaacttaaaataaaagttacaaaaagagcccacaaaagagtaggttaaaaaaagaaaaaaactaatgagaagataattattgtagctttgggaaacaacctaaatgttctacagtgtgggaatgactaaataatttgggtacagctgtacaataggactttatgaagctgctataaaaagaagtagctttatacatgctgatacagaaagatttccaagtctgatttttaagtgacgaaggaaggtatgaaacaatgtttatatagggtattatttgcatgaaaagaaaaatgaatagatgtatacatgctgataaaaccacatggatggatacacaaggggttggtactgtggttgtccacaggggaggaatttggatggctgggaaacattgaagagtgagagaattatttttcgttatacatacttttgagttttgtggctaaatttattcttcaaaaataaatataagaatgctatttatggggaaaaaatgggagtcataaacctgcaatttggacctaacttttcaacttaaaaatgttctgttcttggagttactaactgctctgatgcttaggatgataatcaaataatagttcctctaaaatatgtctggaatgaacttgaatgaatgaatgaatgaatgttttttgcaaaccattatgtgtgtaaaaatgtagagtattaatataaggtttatttagaatagagtcatctgcattaaagaaacttcgttatacaaaaatctaaataaaaaaatgttgtacagtagctctgaggaggtggatgacccaaacactgagaaaagaaaagaggcagaggctgagcaggatagttcagtttgaggtaaagaagcagcctcacccagcctcagacaagactccagggactgtgtgaaaaacctcattttggccaggcgcagtggctcacgcctgtaatcccagcattttgggaggccaaggcgggcagatcacaaggtcaagagatcaagaccatcctggccaacatggtgaaaccctgtcgctactaaaaatacaaaaattagctgggcgtggtggcaggcacctatagtcccagctactcaggaggctgaggcaggagaatcacttgaatccaggaggcagaggttatagtgagctgagatcatgccactgcactccagactgagaatctgtcaaaaaaaaaaaaaaatctcatttctaggcctatgtttcccagaaatatgtcatgaaaataaaactgccctcccaatgggaaaacatatatatgcacaaaaaggtaaatatttttaatgttaaagttactgcataattcctttaaagagtaattatatatttctattcatttttgaaaaccagttttagtaaagacaaagttaaaagatgacaaactggcaaaagaaaaaaaaaagaaatttttgtgaaaaggtatcaatatccttagcgtgtgcacacacacccacacacacacacaatcccttggcaaacaagaaaataatgaatatttcaatagaaaaaagatcaagagactaaagacactgaccaaagaagaactagaaatgtttcacgaaattcacattttagataaaaacgttttaaatatcaaattatgaagtttttttttaaatgactatacttaacattgtgggaaaatatatgcttacatgttgctaaaaatgatatacatttttatagcctttctggaaacattttgtcagtatgtatatatatataaaagaagacaggttgggtgtggtggctcatgcctgttatcccagtgctgccaagaggcagaggttgcagtgatggagtgagccgagatcatatcactgcactccagcctgggtgacagagagagactccattaaaaaaaaaaattagccagacatagtggtgcacacctgtagtcctagctacttgggaggctgaggtgggaagaacacttgagcccatgaggtttggaggttgcagtcagctatgattgcaccacagcctgggtaacagtaggagacattgtctctttaaaaaaaaaaatcagtaattttcttggaataggttaatttcatttatttttttctatgcttttcagttttctaaattttctcccaatgaaaatttgctatatttatattcaaccatattaataaccccaaattagtcacatgtgcaactttctgcaaataaatgtgtcttggatttaatggaaatgaaatcttttcagtatagcttctccctgttatttgcgtacaagcttcaaactgcataaactattttaatggcaaaaattaagttagggttaatcaaccatctaggattgtatctgtgcctaggtttctaaaacaattaaatacttgatcgctttgttggatgttcaaagatttggcaatttgtccttaaatatatgtttcaaataaaatatctacaattttaaggtgcttaagtactggtgaacatgtcaaaatgtgcctaatgtatttttaagttctgctgtgaacttaaaaactttgggatttgtgtaatcccaaattagagaattttaaactttagttggtgtccaccatattgtcccccttttcatccatctgaccaaacttttaaccttcctgtttatggctggggaaaaaaaaagctactttaattaaacctaagcagatagtgttgtttttaaattgtatttcgatgtcactaaaatggggaaacaggttgtaatagcagaatccttatattttttgcacatatcagcctccataaaaggatggaaattgctttgtttttcaatgttttaatttttttaatgaggagaaaaagagcaattgagagtgccataaattaaagatagcgtttctgatgtaaaatcaatgatagttatggattattgtaaatgtttgaagatgctcttggaacactgaaaaatcttagaaaattttgttaaataataattaaaattgtcttaaattagtgtgacatctatgttaaaggcaatataattagatagcgtgcttcttcaagtgcttgggttaggagaagtatttcaccatcttcattcatcaagcatttaacaattttatatgatgtgccagatatcatgttataccttggtgataatacatgcctaagacaaatttcctgtctatgaagtttggaatctagttgaaggagacaggcgtgatgaaagaaataaagcactgtagaagtaggataaaaatccgcatttaggggactgctggcagctcaaagcagactggagatatgggagaaagagaagctgatgaagggttgaatttatatttgagggaaggaaggaggcgaagtcagatcttttcatacaagaggtattgagccaaatattacaaagcaagtaatcaggtgatcaggatagttgaaactgttcagataaagggaacattatgaggatgcagaaattatctagctgacctttggggaaattaaacgtagaataatgtagctggaatgtagactgcaaatagggaaacagaagaggctgtcagcatcaggttagtaaaaccttctatgacagaccaaagacatgacaggttattctgtacatagtggggagctgtagattataatttttttttagtcatgggaagattatcaaatttcctattgcagacaaagggtctcttgttcattgaatgaatattacataatttattcaaacttgcttggtgttaggcaactaaatgttttaaggcatttttttgtagcacagctcttttttctcttttttttttttttggaaacagggactcactatttttgtatttttgaagggaaggggtttcatcatgttggtcaggctggacttgaactcctgacctcaagtgatctgcccacttcggcctcccaaagtgctgggattacagacattagccaccacgcccagaaagcacagatcttttttcaaaagaaatttgtgatgttttaataagaaagaaattaaaaaaaaaacagatacaatggaaagatatcgatcctggaacttttaaatcttggtttagagaaaacagtttattatttgaacaacttcaaacactcaagttaaaaagcactaacaaggcacatctcacttgcacaaaaatgataccaattatcaattgttggtggcaacagaatggagcagcacagaaatctggagacccgttttcagttgaatgctcatagttctaaaataggctctgatttggaattccttgtcttacttttcagtttgattaacgtggaagtctcaatatcttcttatgctgtgtgtaggaaaagtatcttgatcagtatatagaagaatatcccacaatgttactgcaactaagaaaaaattaacccattggagaaaacatttttaatcagttcattaagagtctaatgaaggtgcatatacgaaaagcaagatgtactttaattaatgattgatgttttgtgattgaagcttgctttcctaaataatatttctatacttcagtacagaatgtaaggtccttgctaatgccttatttggtttcttagtttcagtcttactgcagtctgcttttattgtaggcttattacatttatcaccatcattaatttaccatggtgttttatctttttaacttgttatttagatcacattgtataatgctttatttctggtcttgtagcaaaggaatgcatacaacaagcatgtaaaactttattgaatagaacagtctttaaaggggaatcatccataagtcagataaatccatgagtagtatagatttatctactgtaaattttctgtcaggctgttaaaagtagggccgtgtaaatcttactgtcattcacattataataggcacacttaccaatataccaactttatagttttttctccccattttacgggtttagggcttattttttttgagatgtcaagtactattttaacattgtacgtgtttcttaagaaacgccatagaatgaagacaatagggaagtctatttgtgatatattctagctcacttacattttttactgtatcttacaacagtaaacatatcacactatacttgaatttaaattttttcaagtatcattgcattattttgcacataaacatattcttagatggtatcaggttgatgatgatgagcttcatggtaattatttaaaactccataatgagatttgtttccaatctaatcaagaagggtaagaatttggggaaaaaaaatctgttctatagtaattaaagttagccatatgggcacttggctctaaagacttggatgtagtgaatctacccaacccccaagactaatgacttggatggtcttactgtattctcttgtccatagcaaagactgatgaatccagccagggaattctccaccagctctgcttctctgaaaccacaaagtcaggaaatgtaatcagagtgctcagctgaaccagagcaagagctttcctaatggctaactgtgactttagaaatcacatccattagataaagtgattaaatatacatcagtcttttggcaagagagccatgaagatattgcaatagaaccttaccacatgacccacatcttttgcttgaaaaagaaacatgttttcacctttgacacatatcatccctaaattcctcagctcagttgcaggaagcaattttttcatgataagttgtatgcagttcataattttatataaaccataaagtaattgtgtggttgataaactttataaggaaaatgtttctgactttctcatttcaccaccctgatgtgtgggtttttgttttgtattattcttctttttaggcttttcatgcttcaagacttcaagatattttgttaaattcttcccttggaagcctttgtgtcgccaaatcagatttttttaaaacttagatatgaatgtcttaagtgtctacttaggaaatatgtgtgtatgtctgtgtgtgcgtctgtgcttatatatagagagcaggcaaattactcttagcactctgaaaaagctttttttgttaaaataatgttttaaaaatattataaaaaaagtcaccgtcaaaatagcattcgctttatatttgtagttgaaataattcctgtttcttactcttagttataaccatcttttgattaataatatactgcccttcacattttaatacacatgcaactaagccgctgatgtaatacatatacttaaaatgttctttttgagctttgaataaccttttgccttttccctggtgatcaccagtgggcaagatgattgacagagaatgtgtttacaaacatggaatcattgatgactaagttaaaagtgacctcataaaatatagttctaattcttatttacagacaaaattctaagagctcaattcaatgtgtctaggataatagtgggcatagttaaataaataataggaagtgattatcatttacaaaatttcattagtgaattactaaagtatacccctatgcatactaattcctcttccccaaatcaaaacttctcatattcttaaatttctgaattcctaaaatcagcagagatgaagggatggaccagcaactataattttgttgtgttttgtgtttctgaggcacatatagggatacctagtttcatgaaaccaagtggtggggacattacacacaaagagaaagctgttaaaggcagaatgcccagacaagaatgaaaatgaaattcctggaggggcatccccatagtttttctgataatctctctccttacataaaaagcttgaattactggtaaattatccatgcaggaataatagaatcatagaatttttgtagtataaggaattttattgacatcatagttgaaagcagtcattttgtaaatgtttttggtgcccagagatactttaattatggcagaggaagttatagacaagtccacgaaccaggagtagaaaagttttcaaatgagaaatattgcagaccaagcatgttaattttattttattttttattttttattttttattttttttgtgagagggagtttcactcttgttgcccaggctggagtgcaatggcgcaatcttggctcgccacaacctccgcctcccaggttcaagcaattcttctgcctcagcctcctgagtagctgggattacaggcatgccccaccacgcctggctaattttgtatttttagtagagacagggtttctccatgttggtcagactggtctcgaactcccgacttcaggtgatccacctgcctcggccttccaaagtgctgggattacaggcgtgagccaccatgcccggtctgaggtattgttatatacacggcaactctagccttataatgcattgcccttatagtctacttagggtttttaggaatattgtgacctaatttaaaagtttgtagagagattctaattttcagaattaacagtactttcattttctctgaccattgaaatactcctaaattgcaaaatgaagtggaagtacacagtagattagtaaaacatatggttcaatgcataaattgaaataaataaaatgagactatttagaaaatgataacaaatacaacagtaaaaagaactcattacataactttgtgacttttttctttttctttcattggttccttacattttgaactctttctcactttttctgtttccttctttttaaagtaaggaatagagaaagagtgtatacaactgaataagtatttattgattaccttctatgtaccccattgggctaaatatgggagtagaaagatgaataagatggtcacagcttgggggagggtgattatgtcaaatcatgatgagaggagttttttgtttgtttgtttgtttgtttgtttgttttgacggagttttgctcttgttgcccatcctgaagtgcaatggcgtgatctcggctcaccgcaatctccgctcctgggttcaagcgattctcctgcctcagccttccgaggagccgggattataagcacgcgccaccacgcccggctaattttgtattttttttagtagagatggagtttctccatgttggtcaggctggtcttgaacttccgacctcaagtgatctgcccacctctgcctcccaaagtgttgggattacagacgtgagccactgcacccggccactactttggaggtttaagaaaagtagttgtaggtttaaaactcttggactggctcctgagggaagaattaaaatgccctattggagcatagccacctatctaggatcttgagtcctagataggtgggtgggaatgagtatcaggaaattgggctgggaccacttaggacaggcccttgtgggttaatcccataagctattgagaagccactgatgattttttaacagaagagagatgtgatcaatttttaattaccactctgacagtactatatattctgtggataagacaaaatgagagtggaaacctagagacttggagaccattgtgatagtacagataaaagataaagagaaaaagcaaagggaaagggtttagggttgatttagaaagtataatcaatagcccttgttgattagatgttactctattctgagttcccagggagtaaatggtactttttattactagcactggctactgactggcaatcatttaaatgagcgggttaaaataagagtatatgaaaaattagagtttgtggaacttgaggggcatatctaggctggaaaatagctacttgtcattttttttttttaatgttggaagactttctattcttagtttgtaggaaaaatgtacatgataatcaacaaaccgttacacatgtgctaaggtggtatattaactaattttcattggctcatgagttacatgctacctggcatcctcttgcctcttcctctctggagccacagattgttagcagagaagctggaagaacctaccatcttgccataggaaaaaggtttggtccttctggaacatgcctgtgaaaagttgccaatttcctatgtaggtcctggacttatctggaattcaaatatgactagacaccatgtattttatctggcactccgatcctatgtgtttttttttaaatatttatcctcctttgtctcttcatgaccttattatacaagttctagatcagagtgtaacagcctctttaaattctgtggcatgaactttaaatgcctgtgaagaatggggctgggttacgattggctaccagtgaattccaggtaatttagacacttcctggatttgttttccgtgtcatcatttattgattacttcatataaagtcttaatgtgtttattactcaggaaaaatgatggaatagtagcagcaatgccacaggtgtgttgtgaacattaattagttaattacaaagcatttagttgagaggcattctaaatagcacagaactcaaggctttcctccccaaccaggggtccacttaaatagctctttactaagtcaggagaaacaaacacatcttgtacatgaggtacatcaaccactaggcatgttgatctcccagggtgattttctgcatgaaaacctatcccctgggtgtcaagagctttctaagagcaatgattcatgaaccctctggatttaggacaatgctatgaaattattttcatctgtattctgaaataattacttgatgtcctattaaagtattttatattttttgccagaagttgtaggtgtaattggaaacaacagaatactcaaaaaaataaaagatcccaaaggagaataagaagaaagagagagaggaatgggctataaagacggcaagagtgatggaccagtgcctaaagattttagacagactctcaaatttactcttcttatgttctctctaaacaccattcttattagttcagcatcactgtaataactaaaaatattttaaaaagtggacaaggcagatgtcagcaaattgatgtggagaaatgggacagacacatggatgactcactcccagtcccaattccctattttattttttcatttgaaatatccatctcttcagagttctgtctagtgtgaggttcaaacaatttaaatgcttttctcaaaactattgtgcaaatgtctgtttttctgtatttttgtgtctttctgatgttcctctcctggcttttcacctactatcacaaattacatactttattatgtacttttatatatcatatacttttcaatgagcttgattcccacctgaacccacgctttagagagaacaatgataggtttctctgcacctgctccatatttagtaagtttccaattccttttggtgtcaaacaatagcaggtatctctgcagtcccttaggtcactaatgtgcttggttttgttgtcagggtagcagctgaaccatatctttcacaaacaggagatacatattttttcccagcttgagcagagcatctcacatttattaggagaaatgcccctagaggcccatctgtgtgtctttgacggctcaagtattatgtactttaagaagtttaatacattttctactggacagtattgagttgttttaaaatattaaaatcttactttgctgagataaataaaaggtattcaggcttttccaagacaagtatgagaaatgccaagttacaacaggttcactaatgagggagaagaaaagtttcatgataatactatgatctttgctattgcatttggaatttagttagacctaaataatgagaagacttttgtgatgatctattcaatttttatggcctatggtctttttgagaaattgattaaggcaggggaaaggggatagtggtagggcatcactgactcttgttttcttgcttgtttactcttttcacgaagtggtaatacaaattacctcccacagcagcacaggttactcaaaagcccagaggagcaggagaatgagacattccttattcatatttcagtaaggtattcttctccatctttgttgtttcaaggcagatgacaaaatttagtagccattttagtgcagaatactcccaaattcagggaggaagctagattcagttgtttttcagtaatattggaaagtgtaatgtgtaatgcccatgtttaaacagttgctttcttcctaacatgataaacttctatcgttagaagatattctcttgggatgaaaataaaaagatatagcataggccccgtttattttatttggggaggaggtagtagtagcggaaaatataaccagcgataccatcttcattactaatgatgacaacttacaacatcaggagctcaggaagaaggaaagcaataaataccttcatcttcaacaggattttctggcaattatatctgtttttgtttgtatgtttgtttgttttgtcctctattaatttgaaatgcctagattgtttttctggaacttagttttatatcaatcaataaaccccttttccctacttttttttgttactttttttcaagagcatactgacctcaacgtggtgaaagttttcaaaagaggcggatataagcttaaaacctgcctctgcccactcctgatctatctcaaatgaacatctgtaactctccatgaattaaaatgaggataataacatgttctaattgttatagaaaaaattacatttgtagcacagggtagctgctttatgcatatttttttctaagttatgcacaccacaattcagtactaattttgtcatgatgtcctgaagaaatcctaaaaatagagattctgtgaaagaacattgagtaccacataatcaagatatatatgtcttgattcattgattgattcattcattcagggcattatatagcagtcatttttttgctacccttccacatggatgatagttaaagactctactgaagccactagatacccatcttatacacaggctgtaatattttaactcctggagtaattggggtatattcacaataaaatcagctcaaatctaatttatttctttcatgaggtctgaaatgtagtcaaagcttccatttagttcctcgagaaaaagcttctggcaaagataacaaaggacatgattcaaatgctttctgtcttacactgctgcttcacatcaggggcagaggattttatgtttcatggccttctcctcccacatattttgggttttctcatctaatcatacagctatgatgtcagtgatggaaatttccacctcttagtttggtatcttgattgttttttctttccctgtttgcacaaaggattgtaggtggctttccagaaaagagacatgaaaaggatcactaaaaggagcttcaaaacaaattagattatttgttgtggggagaaaaatcatagcagcaggaaatttcattgtgccttttacacaagatctaacatgctgatgaattgctagtataatgatgatttatagagctgagtttcttttgaccaagcccagtactcttgcaaggttaaacaattctaatggcggatgacttgaaggactattttctaagcgaatgtacaaattacaagtccttagtttcgtaagatgctgtttcatcaaaggcttttctttgtggtttctcatatttcatattcatgttgactcccaggtgatagttaatggtatcttttttagtagtgctattatcagcttcaaatgaaataatagataataaaaagccttattattaatgtcatattttgatatatttttaactttataaggctttttagtattattaatgtcatattttgatatacttttaaccttatacttcatttattctaagtaatgtgatgtgatcaataatttttcaattaagtacttttctttttgtctgtgctagtttagtttagttgattggaatatgatgttactgtaactaaagcaaagtttggattcctgtaaaaagacttagcatttctccatagaaaggcatatgtacttttagataattctccatgatcctaatctgttatctcacaagtaaagaattgacacttagcattttgagatttaatatgtattgagtggttcttgtgctttgcccctctactcactttacattataaagcatctacataaaatgatttgtacattatctattgtaatgcacacaataatataatgaagatggggataattgctatctccactttttcttttcttttcttttcttttctttttttgaaacacaatctcactctgtctcccaggctgagtgcagtggcacagtcacagttcactgcaacctccatccccaggggctcaagcaaacatcctgtctcagcctcttgagtagctgagatccactcccctcggcctcccaaagtgctgggattataggcatgagccatcacacctggccttccactttttcaatgaggaaaccgtggtttagagaagtaaagacatgttatcacatgcaacaagaaaaaaacagaactgcaattcaaatcaggttctttctcatagttcttaataccatcctatagtcctcaaaccaaaggttccctcttgcttgactttgagatgatgtatagaatcactcttgaaataaaataaatattttatttaatttttttctttttcccagaaaagtaatctagtattttgtatcaatcaaaaacttctattttgaaaatacaagcattcctagttctataaaatatcaacatatgtaaagtctcctaaaagctttgggtttttatatgtgaagcctttacttctgttttctttttgaaataaaacattgattagaattctaaataggttatcacaaatctataatttttttcctataaaacaagcaaagtatatgacaaaaaaatcggtgctcttttttcacctcaccaagaaaattagtgtaattatttcatatgaataagactttttacctgcactacattatttagttaattttacaggctctagaaagatgttatgcaagagaagacatttcaattaatctgatgttgaaagaatgctagttttaaaactcaatgcactctatgtgctaaaaacgtttttgcagcatgaaggtagggatggacagggacatgtttgcctgagttctccagggaagctttggtggtggatgtatgcaaagggcataatctgtggtttccaaagttgaatatgcacacctaagaacaatgctggaagagctttgtcttcattcttatctttaaaagtttcaattttattcaagatcaaggtaatgatagatttaaaaaataatgataaaataaaaaatagtttcaattttgtgtatatttttaaatgcatatgttttacactgcatgtgtagattgtttataatttagcaagcatataaattcatttattgggagatcttttattattattggtattgctattattgagctggtaagggtgatgatcaaaaataattggagactctattctaaacgtgaggtagaaaattttctctgactctaatggtttaatctttaaaaaacagtttaagccacactataattaaagccataatgtttgtaacacttaattataaggatggaaaacttggtcctatagatattatcaccttaaggaaaggcaggaaagctaactgcagtagttgaccattggcacattgaaggggtcatgactggcctgcagtgtcaaaaagtgaccaaacagggacatctccatatggcattcattgactagattggttctattactgattgaagtcatttgtgttttttgtacaaactttaaatagcccaaagattctaaacgattttaaagtaaatgcaatatattattagtattatatagtctatacatacgtgctgatgtgtttgtgcgcttttctctatttatagggcatcataatttctcaaatataaggtataatataatcaggacaagacttgggaacaacatagtatacataataatcacatagttattattttgacaaacatttatgccacacatgcagaaacacaagtctgcaaccctccctatgtattgacattattctgcaagtatgcttacaaaacaatataagagagatcagaatatcctagtattcttaaggttaaaaccgaaacctttcttgtatttcctgaatgaaatgacagattaatgttattgatgaaatgaatatggcttggcttccttgagacacaggctgttagtaaaaaagcaattaagaaaataataaagaaatgaaacagcaattcctcttcctttttcctttcttctgtactgtgtcatagcaaaagtaatataatagcaactaattataggaaatctcccagactttgtaattggatctttcattttttcccacagcaactgtgaactaagaatttattcacagagcagctgtagtttgtttccagtaactcttagcagtgtctctttgtggagtcttaaagagacccatgtacatatttaggcatattggctaaactagtgccttttaaaacatctgcaggtctattgttgccaattctttcattgtcttctatcaaattaacttttcttagacggtataaagtgggagaagccactgaactcaaagctcaaagcctgacttctggtcatagcttcaatgtttccttaaacatgacttggtaacaagcaccaaactttgtaaatctcaatgtcacctttggtaagaaaaatgaaaggaatctttgcagtttatattttagagcattgctatatgtgaaagagctgtgaaaattataaaccagtgtaactcaccatgtcattatatagatatgtctaagttattcttgaatgtgaaatttccatttgcttgacaaatgtcactctattacatacatgatagttaaaagcatcttattttccatttgttccccagcccagttttcaacttttcttctaaaaaggtaaggtcaattaagagatatttccaaaggaaatagttctttagaaaatactttagtatatcaatgcacataataatacaaagaaatgcagttataaaaataaaatatagaataaatacacagctaccatattcttggcatatatttgtacatgaagaaataaacttcaaagccaggcaggacggctcatgcctgcaatcccagcactttgggaggctgaggtgggtggatcacttgagcccaggagttcaagaccagccggggcaacatagtaagaccccatttctataaaaaatagacaaaacttagccgggtgttgtggcgcctgcctgcagtcctagctacttgagaggctgaggtgggagggtcacttgaatcccagaggtggaggctgcagtgagctgtcaatgcactactgcactacagcctgggtgacacagaaatacactatcaaaaaagaaagaagagaaaggaaagaaagaaagaaaaagaaagaaagaaagaaagaaagaaagaaagaaagaaagaaagaaagaaagaaagaaagaaagggaaagaaaagaaaggagagagggaaggaaggaaaagaaagaaagaaagaaaaaaagaaagagaaagaaagaaaacgttgtgatatgattagaggactaagtcttaacgattagaagcctgatttttaaaaaattcaaaaaccaagaatcagtagtagtagttgagaaagtaaaactgagtgaaaagtagttttgcaatcaatgtggaaacactatttggtaaaatgcacttgtacttgaccttcaagtaatagatatgtcaatgttaaaatggcatgttttgaaagaaaacccatgtcaaatagtcgatataaattatagattatatttctcagataattataaattataaaatttctgagtacattcttcccaagatgtgttatttgaggcttttgtcttcactcattttcattaaggagactggtttcccatttgttttctcttttctttgttttcaagctgtaatactgtagagtaaaccctagccaggtgcttgtcctgccttacttcatcccctctttctaacagactacccgtgtaacttcctcaccagtgaaataggagacatagttcctgaggttaaatcatttactcaggttcatacaagagtggtaaagccaacatttggacttataatttcctacaatatgctacctctctagatagtagaattaaatttcaaagagaaatgtcaggagaaattccatattctacactaaggttctcatctattttattttccaccatattattacatagaagttatttaatttaaaagtctgattttaaggtaacctttatactattaactctcctccttgaagtgctacatttacaagtaattaacaaatactgtttgagcaagcacttgttcaggtgccagggactccagtttttgttaatttaaatatagatgcttgatatcatttattggggtgaaagagaataaaacaccttctcacccaccttcctaaattcattatagttaacagagggagtctataaaaatactaggacatagggactcattacattctaacaaaattctaagaacatgcatgtctttccccaggcatttagcttcccctccctcctcctattttttcatatcttaaagtaagatctaaattaaaaatttagaaattcccaaattatgttgctgttgataaaaggccactacatgtgaaatcagccttttctgtgatacattatatatcagagagtcagctattacttgtttgtgcctttaagaaagttaagaccaacttacctgtcattttaaatttgatttccgaagagcagtgtgccagaaatttggcttaaacagaccaacaaagcgtggcttctaggtgttcctgatgggcaggcttttttcaattaacttcctggggattgttttatttaattacaaggacagtttaccagataaactactcactgattgaatttctaaactcaagtctgctgaataaagccaaatgagtcatcgataaaaattcagatgccaagacctttgcaacaggtacatactctaagccatgtatttctgcattttaaagttttaaaacatccttcctctaatgttatcttttttttctatactggcctggggagtaacagatcttagttcaaatcctggctctgctacacacagctgtgttaccttgagcaaagtatctaattccatagataacgctttagtttccttagttgtgaattgaaaaattcagtgaacccaagttgagacgcattctacaaaataactgatttgtattctgcccaattgtcaggtcacgaaagaaaagaaaacaattgaagttctgttgcagataaaaagagactaatgaggtataacaactaaatgcaataaaaaatgatgtaatttaagtaagatttgcaattcagatagtaatatcatactggtgttaattttcttgattactatggttatataattgttaacattataggaagtggggcagggggtacaagggaatatttagtactatttttgctcctttcctataattagctcacaataaaaaatttaaaaaacaaataaaagttatggagagaggagaagccaacaaatagcataagtatagaactgtttttgtacacatgggcgttagacagatagtaatagtaatatcttgtataattttaatataaagagcaccgaaagagaaaaaaaaataagccctaaatcaatgccgagggtgtcatctttctttggaacccccttaatgcagtgactcctgtaagtgggcatgtccctttcatacagagttgcagttgttacaattgataagggttcatgtgagacaagcaattttgaagcagggcaactcccacaactgctcaatgtggacctcatctccttgtatttgcatagatatgctttgctgcatggattgctgcaaaattgctgaaaagactcccatacaaggagaatgcctggcactactcctccgtttgaaagctctggtttctctcttgtatcctgggaagagtgctgccaagtagtccatagacctcttcttatttccttaacttgctgtgtacattttgaagcatttatgtgtcagtttatttaactccccctgcctaataatgataataacaataatagaggtatgtattgagttcttattggttcaagtatgattctagagtgtttatatgcattaactcatttaaatattcaaaatccttttcatactcattttaccgatgagtaaactgagatacacagttaagtaacttaactaaggtgacctagcttttcagtgttggagtctggattaaaaagaaggtagcctggcttgcacttttcagcctttagaaatatacatacgaccatatccatctgctgaattccaactcaactttccttctttcctataccagctcaaaccaatttctaaccccttgtgtttccaaggtacttttaaaatacttccattcaagctgttttgccatgttttgtactatgatcatttatgtacacgtctttcttaaaaaccattagcctcttgggactaggaatattcctgggcaatgtcaaaatactctttatatgctggtgtctccaaagttactatttccaacccagcctcccattttaagttccagagtaacatggttagctacttattggacctgtctactttgtgtctcccaggcatctcaaacacaggatgtccaaaattggatttatcatttttcttccctgttctttaagcctcatcctcctagtttcctctcataagaaatcactggagtattaacttggcaggccaagtcagatacctgaaagtaatcttggatgctcatctcacttctggaatcccgagttcaactgccatttccagcctttcattatctttcaaatgtaaccacatacctatacctcaatatgtttccatacccccaccaatcatatcagttttattcacttggtaaccgatctttctgctgtaaatttaccctctagactatgtgaaaagtgagttttacaaaatatggacttgatcattttcctgcttaatctcttcaaaatcatacatctaccttcctctggaccccctttctctccactttctttgttaaggaaatagtcccttaaaaataatgaaaataatcagtcaatattttccaatgagttagtgtcaatgcccagggtctacaactcagcacaggtatcctttattaagtgtactataaaaggagtaccaaagcttagagcttaatcactggatgacactggaatgattacaactgaaaacagttagtgattagccttggtggatatattggaagcctagaatacctctcagaagatatagaactaaaaacccagccagcctctcaggccgtttacagtgtaaacaaagcaattagagccaaaggagcaagtaagttctaaggaccctggcattgttaaatggaaaaagcctccaggtgaaattgtggtctaagcataggtttctcaacctcagcttaatcgattttgggggcattcctataggaactttagcagcctctctgtcctctacccaccaggtgtccatagcaagcacccttcttcctccatgttcccatgagggaggagagtccgatatctatacagtatatgaaactaggaaatgtatgtaatgattttgtcctgcaccctttattggctttgtcaagacagcctaaatttcctgtatcttagcttttttcaataaattacaaaaatttgacagttggagccatttttctgcgacagtaattggtgattaaatcgcttaaatgccaacattagccaaaatgtttacctctacaaatgagaatctttacaatccctatcctctttctagcaggtttggctaagggaacaccaaaagcacaggcagaaaattacaattacaattgtccctcagtatcagtgagggattggttctaggacctcatgagatactgaaatctggagatgctcaagttctttacataaaatggtgtaacatttgcacataatctattcacatcctaccgtatactttaaatcatctctagattacttataatacctaatccaatgtaattgttgttattctgcattcattaggaaataatgacaagaaaaaaaactctgtacatgctcagactgtgcttatttttcatattcaagaaaggaaaagaatggtctttaagcccaagtttcaagttgtgaacaggtaatcatcattatttatcattaactcagaatcagtacacaggctctgaaaatcagctaaatctgtgaaattctcattccagtggccatgtttctgaaaataaaccagtcaataactgcctcactccagtaactatgcttctgaaagttagcaagtgaaggccagtccaagcttttgaaagtctgctaatgataaactcccagtcccgaacatcaccctgtcagtgcctgcccctatggtgctagagaacagccaatcagtaagtgtcccactctagtgaccatgtttccaaaatttagaaggtcaacggcagtcttactccagtgtccacactaacacagctggaagtccttgagtctctaaacactctgcacatttccccaaaccttatataatgtcagctgtggctttgttccaggaacttatctctcacaaatacagttctctcttgctggcaaacagaacgtttagatttttggcatccaatatttagttcaatttactgtaagttcacaagtttgcaatcctttcattggctcaactcttgtttatgtttagttatgagtttgtacctgtgagtgactgacagtgacaaagctgtgagattatcaaattcaatcttttcaattcctgggtcaattactaatatccattttttatttgtgtagaagtaaactcaaaaatgtcaaaatgcaagtaagttttgtgataaattttatgaacaatggatgtgcattaaacaaagaaaaactccttttgaagctctttgtgcagcatacaattgtttagctaatattgaaaatggtgaaaacttggatgtaagccagcaaatactaacagctaagcaaatagatgtatgatttcctcaacttgtaccaaagaaagtaataaaatcacatcttattgaaagaaattcagatgaagaagataaaataattgcagcacaagttgtcttccactttgtatatcatacaaggttttaagctcacatgacttaatttgaattgtgctacaagtattttttaatgcaaaattgtaagtaaattttctagtgctataggacaaaatctactgccgtaataaaaattagaataactccatttactgttacagagattaccacagctcaaatgttttacttttttatggcatagccatgaatgcaagtaatcacaatttgggggaaaaattcctttactcgtataataattttctcataaaaagacttgcttacaaggctattgtaacacgccttccagatgagtcttcagaaacaacaagaaattgttgcagagaccctatgattgagttagtagtcataaaaattatacttattttgtggaggtaatacaaatataaattggtggatatttgcataaaggtgtgatatttattgaaagttaaagcaaagtataaatgggactatgaacagtgttgcctcttctgccatattctacatgacgctgctcaaacagcatctgatatcagtaaagtaattgccagtaaagaaattgtcaagaaattattctatttcagcatttattctgttcagactctactaatgaagaatttttgtaattttgttggcattcgttattttcagttctttcacattttaaaattcactggctctctttaatagatgcagttgagagaattcttagtttatttaaagcaccgaaatcatactttaattctgaagaaaaggtctcacaaattcttgctgacttttaaaataacccattgagtaaagactacttatttcttgctcatagcattccatatcttttagcaataggattatgcaatttgaaagaagagtaaacattgttaattgatgccctccattgcttacaaagagttgttgaatgtattaaagataaaatggatgaaaagtttatcccttgtatgccaaggctgttttaagaggaacaacacaacttagggacagggaaaaagtccgtattgaagtggataattatttttacatttgtcatgagtatattttgaaatgtattttatcccttgaagaatttgatcctttaatggaacaggagaaattatatgcactcaaagaagggaataaaaattcatgacaatgttctgttttgtcagtggaaaatatttttaaaagttgtagatcaaaatatgcaatctaatcctgaaaaataaaaaaaaacaagttatgtcatgaaatatggtattgtgttctttagcaaaagagtaagtcccagagttaactttaagtcaatacatgttcagaagtccagcttataaggctaacactgaacatgttcaataagctggacttataagctggacttcacgatgttctcattaatgaatgttgaatggagaaaagagaaaatttggatgtgaccactatggaagacatgttacattgtagggggaacataggctttaactataaggaattttataagtcaactctgcaaaacaaggagctgttaatgaaagccaatcatcgaggaaattttcagaaaagaaatctctaatttacatactgatcatttattttagataaacaattagtaaattttaagattaagactgttctgtaaaaacatttccatttatggtcagaatatgtatacacaatgataaataattcaaatttaactgactgtgtattctttttgctaactctggtaactccacctggaggtagggaagaattatcctgttgaggaccactggtttagaccaagataaaatattatagcattcttacaattattatttaataactttattatactatttatatttcttaaaataaatatattcttggatttgccatattttcttgaggacaaaaatatttttgaaatataataaaatataattttaaaagaaaatttaattttaaaatattttagagtattgaaagtttgttttattgtagtaagttagcatcatcaggttgcttatggaaggcttatggtcctgcaagattaaataatggcttggttttgttatatttacatctgtgatttcatttttaaaaactaagaataatagtgtagaagatataaaagcagtgtgtatatttaaagtgaattttaaggacggacttagtccaaaataaaagttttggactgtggatattgcagaaatattattaataaagataatgagcaaaatcatcatatctattttatagtataagaagtaatatgataggaacaatattgaaatggattctgcatttacagactgcattatgtttcttttaaatcactacttctgaggtcaagtgattaattttcaagtgattcagaagaaatgctttaatcacttagcaaaactgtcatagccaaaaggagcttgttttggtcataacctagttcccacaaagtgagccaaaagtaatttctcatattaagcaaagatattgattacaagcaagagaaacaaacactggctgtcccaagccaaatggagatttattggaagttgttgggtactcatgcattcattggaaggctttgggaaactagagcagctgtataggaaaatgagctgacaaaagggaaatctagaggctgtttggcagacccagctggctagactactggtcactgctgccacacaggattctactatagctgtacatagacccagcacaagggaatttcaataaaatcttcctttatttggcttcattcaccaagttcaaagtaaagggcaacagaatccatttgaataagcttaggagatgatggcctcaccacttaaaataacaggagtggaatggaaatatagtcactttagtcactttagctttccacggcaggtgtcaaggctctgaattccatcaccactacacacaatgggaaatacctgttcattctagataagaaggaagattggatattggatagaaaaaaaagtagacatataattaggtcatatcatatgacattctttgtcatttttgactttttatattaaagtagtgatggaaagttagtggaatatgaaacaaaagttacaaggatgagcaataaaataaacagaaattatattaacattgagcaatgaactataacaaagttttgtcataccagaagcaaaagtaaaaagtattatttctcaaagaagaagacactcatctcttatagcactattaaataaattcttggattgtgtaataatccagtttataaagaagagtgaatcatatgaatatgttgaggaaaaatattaggatgtcttgctcatttgccataaaatggccaaacatgttgagataacaaactcttcatacatcactacattgaggatattgataacagagtggttgggtgttgtcgatttagagtatataagattagcttctgaataaggacactgtacaggctctgatatcttacaactcatatgtgaaagaaacttgatggaggtgttcccaaatttgacagtaatactgaaaattttcatgccattaccaaaaacaagttgtaaaactcagagaaatttgctcaactatcagtaatgaacatacacacactatactcagttgtggtaaaagaaagactaaatttttctatcttctccattacaaaattgatacaaagtaaagggaagatcaaagagaatgaagccaaaaatgaagggaagtcctaaagaaatgtgttaaggagtaaattaataaaattttggaatttatggtattggttaattatttttaatacagagacaacttatttaatttttgttctcacttttaataaacattcacttttatattaatctgtcttttgtgcctaatttgcccttgtatttttgcattttttctcaacctcctcccccagttgtataagccacagatccataaaacctggatctgtttataggccacagtgggttagatcaggggtttccatcccctgggccagtgacagatactggtccatggcctgttaggaaccaggctgcacagcaggaggtgagcagcagcccagtgaacattaccacctgagttcttcctcctgttagatcagccttggcattagactctcagagaagtgcaagctttattgtgaactgcacatacgagggatctaagttgcacactccttatgagactctaactaatgcctgatcatctgaagtggaatagtttcgtcccaaaacctacctccttccctgctgccctgaaaaaattgtcttccatgaaaccagtccttggttccaagaaggttggggactgctggattgccaggtgttatcactaagagagcaaataggtaaaatgtctggtaatatacactggaatattatgcagtagttagaagtgcagattagatgtatttacaacaacatgaatgctaagtactttaaatcatagtgcttagtaaataaaaacaaacaatgagaaaatgtatgtaaattagagattcatgtgtacaatattcaattttcaagaaaacagaaagatgttcataaacacattataatggttgctaagcatgggaatgaaaaacaggtagagtggcagagaatgggatatgggggcaatggagaaaaaatattaataaaaggaggctttgcatggccaatgataacaattggccacaaactgggaatttaacctggaacttgaggttaaaaaaatctgtagaatgcaggaactttggttgatattatccacaatacaagtaagttatgatttaacctttagaaggaaaataagctttgtgcatcctttaaaatttttaattagaatagtttgaagactagacaagtacaggaatagaaaatctagagagtttatgaagctatatatttcaaattccatcgaaggacaaagccaaagatgattttttttcttgtttggaaaagttgagagtaagtaaggacaatcagacttgatgacaaagccaaaaatgaaggagacagctcctggatcatagcaaactgttaacacaagagggaggaattgtaggagatacctgtcatagtacagaccagcaaatttctactcatcttccttccctgaccaaaatctttcttcctaagtccaagttaggtgccttttctgtgtgttctcattgctctcatatagtaggtgtgttgtaattgtttacctgctggttttccccaacagactgtaagccctagaggacaaggatcaaggccacctagttagtattgtgtcccaggcacctggcaccttaaaaatatttgttgctcttacctccaaacaacaacaacaacccccccccaacaataacaaacaacaaaaatgggtaacaactagagatggtagatatgttaatttcctttactatggtaaccttttttttactatctacatgtatccaatagcatcatgttgtataccttaaatatacacaataaagtgtattttaaaatatctgttgaagagtaagtaaaatgaaatgaacctattaaaggaatatcagtataatatttcacacatgtgaccattattttcataacttgctgcgggggtaaaccttaaaatcaagactaccttcattttgttttggtaatttgaaaagtaaggaaccgataatatttaggcatttttttactttaatcttttgtagtttaataaagaaaaatttccaaactacattctgttaattgtgctagcaagttattatgatggcattttaaaaaattaatgcaaataataatgatgcagataatcaatttaattgatggctggtcacttaagatcgctttctaattttcagttattaaaaggtctttcaaaataaggctacttttgtaaaaaaataatttttatactatattgtacattaagggaattcatggatggtgttttctacacaacagagaaaaaattttatgtaaacctgagagcaattactttaccaattaaatcactcaaatgttgtagactaaaataattgaaagtcaaaataagattaaagaaaatcagttttcatatacaaataatggtaagggattcaagaaaataaaaattggacttaatgcattttaacctatatagttttgaaaaccataaaacataaaccttattgctttgtgtagtcatttttcacctttgtagagtccatttttccttacatgtaaacaggcgcctattctaatattcttcatttcttgctgtgtttccattctttttgtctaagatcttttccttctgcctaaagtacttcctttagtgtatattttagtacaatgattaattctctcaacttgagttttcagaaaaagaagtttttaaaaacattttacgttcatctttttaacttttcattaagtataacatacttaaataaaaatgcatatatcatgttctcgcttataagtgagacacatagaggggaaaaacacacactggaacctttcaaatacagtagagggtgggaggaggcagaagatcaggaaaaataaccaatgagtactaggtctaatacctgggtgatgaaataagctgtaaaacaaacccccatgacacaagtttacctatgtaacaaacctggacttgtactcctgaacttaaaataaaagttaaaaaaaaaatgcatatatcctaaaaatatagtttgatgaattcttcacaaacgaaacaaaccatgtaaccaatactgggatgaaaacacagaattccttcactctagaataatattttcactctctctaatgttccagagtgtcagggactacaaaggctacaaaaccaaatgacaggtctgctttgttccaagcaatgttacaggctaaagatacactgcttgtaggatttcatactcttaaaagttcccaggtacataaaattctactaattagttaaatgaagctgtgtattcatggacaatagttaaattgtgacacagatgagtgtacctagcaccttgttagagaaagctccttagtatcaatgagatgtgaaggacatctaagagttatcagggctagaggtctggggagagttatcctggctcatgctagtcttttagtgaaatggcctggacaaattcatagtgaagatgggcagtcaattgataagattatattatatttgactgtttatttctaataagattataaaaagattataaagttaaaagcaaattgaggtgttgtagtgaggaaagaggattgtatagattcataatggctggctcaattccagtgtttttactctacttaagtgtatagatttggttaatttttaaaatttcaggtaacaaataatatggtcatcattgaaatccctaaatataataaattacaaccattgtttttactgaatctagactaggggaagagtaagataaaacaagataagtagaatgttggcaatttaaaaaattgtgccaggctcagtggttgatgcctgtaaccccagcactttgggaggccaaggagggcagatcacttgagcccaggagttcaagacgagcctgggcaacatggtgagaccttgtctctacaaaaaatgctttaaaaaattagcccagcatggtggcacgcacctgtggtcccagctacttgggaaggtgggaggtcgcttgagtgcacgaggatgatgctccagtgagccgtgatcacagtattgcactgcaacctgggcaacagagtgagtgagaccttgtgtttataagaaaatttatacctttcaaaaatttaaactcatactttctgcccatattacagctgcctccttctgtggtataaacgcaatattaaatattgtgtttatttttatcaaaataagacagaaattctcaagacagaaaatgaaaagttttgtcaaggggtttcacagacctttcattgaattttaattgcaatgctaaacaatatttgaagataacccatagtggtcccagtcttcagcctgaagtcaagaacctttagttatctgaatgttctcaagctccaagactccctaggatgttatttaagcaaagtgcaggatttccaaacactagtgattaatatatgacatctgcttactacagcactgttgtgcagccacaaaatctttcagaaaagttcacaataactatggcttactttgataaagaatagtcagtaggatggttagtctaatatgctctcataaaaaaagaaaagtattatgaggtggtgccaggaccttgggtcctatttggctatttctccaaggatctctcaatggtaagatcatcatatatctaagcttgcctagaacagtccaaggtcattcctgctgtcttggtattttctgtgttgtgtagcatttattcttgacacaaaatcctggcttggaacataaatgctgtagacatcctgccaaggattgaatcaaatttataagtgtaaccctgacagctagggtagagctgtctatttccttcctccaaagatgttatcaggtatttagattagtaaaatgagaaatactgagatacccttataattcaaggagcacataggaatggatatagacttggtttaagtattatttttcccctgtattctccagattcaatcgtttcgcacctttgactttcttatctaaactgtagagctattcaatgactaaattgtacttcttattgtctttgaatgtttcagctttatcttgttattgacatatagaatttttattatcttgatatttcacttattcaatcggaggccaggtgtaggaaggactccaatattttcttggtgccaagacatagaacagagttttcagatccatctggaaatttttctgttttcatgggagaaggcctataagagttcatactggaaggaaacattgcctctctcatctctcctgatgacatatttctcttttatcatgggaagtcttatgttatgagtagataagttatgaaggtgatgttatcgaacataggagagtaatttaaaatattattgacaaaaggggcttttgtagttataaaccagggttaagcgtatccttgtcagccagagtggagctgtatttttgtcttgctctgatgatgttatcaggtgttcagagctcagtaaaatgagaatctcagagtcaaatacatttcttttatctctatgttacctcacagttcctaaagtaacacagaaatcaaaagtcagccttttgtaccttaacggcatcattaagatggatatgtaataaagcttcaatttaacaacttaaaagatatttagtatgcttaccatggttgagggagttaaattgtacttattctaaaagaaaatacacacagattccctcataagtgtatttttttagcctattataataagacataatgactctcaagtataattaggactcagacattgtgactccagtttagttctatgtttataagtcataagctcattcctgacccaggagagtgcatttatagaaaattatcctcccaggcatgattactttaagaaaactgatcagcatttctaatggatctcctattgatcaaagcaatgctattttgtactgtgtaaaatatgtatttttaatgtattaattgtaattcattttaattaaaagtggttcaaatttatgtctattatcacttaggtatattatagataatatagataatggcaatgcatttacctgataaattcaaattcactgagctattattacctttatttaatattagaataattctacatctgtgatttccttttgcttaaacttttgtcttggaatagatttatggaaaaatggtgcagatagtaaggacagtttcaatataccccacatccagtttcccctgttattaacagtttatattagtatggcgcatttgtcacaattaacaaaaccatgtgatacatcattattattaacaaatgcccttaccctattcagagttccttagtttttcactaatttcctttttctctttcaagatctcacccaggctaccacattacatttaaccatcataccatcatatcaccttaagcatctctaggctgtcgcaatttctcaggctttccttgtttttgatgatgttgatactttgagtgagtataggttaggtattttgtagaatgttcctgaattggtatttgtctgatatttttctcatggttagattaaggctataagttttgggaaggaagatcacatatgtaaaaggccattctcatcacatagtatcaatggtacacattgtcaatgagttatcgttgttgatgttaactatgatttaaataaactttttaggttctcatgttctgattctatggtgccttgagaatgctttaaaaattaatggtacttcagtcaagattttacctgcaggaaaaaatcactatgtgtttctagagaagtgacattttcaaagcagtatttcattttacaacagttagcatcaataaaaatgtattttttatttatctttacatttgtccactgtcttaaatatttatactgactcaatctcattcagattttggcagatcttccaaatgattaattggaccaattttaaataaataaatttatttatttatttgagatggagtcccgctctctggttcaggctggagtgcagtggcgcgatctcggctcactgcaacctctgcctgctgggttcaagtaattctcctgcctcagcctcctgagtagctgagattgcaggcgcccacaccacacctggctaattgttgtaattttatcgaaataagattaagttatttacaggtaagaggctcagtgatggaatgcaaaacagcctgaaattattatagagttgtgagcatgtagctattttcctgctccttgaaataagaaaatatagagttgtgagcgtgtagctattttcctgctccttgaaataagaaaatgtcatatcatagtccctctaatcaagattaaagaaacaaacaagtaaacactacttgctttctacaagagatgtcaaaagttatcaaaggaaacatactgtttaaaggaattatctgggagatatttttaagagaataacttattctcttaaataaatatagctttcatatataagataaacattaattattacaaaagcacaacatattacaaaattatatggacataatatgcacatactctaactgagccacaatagaattggtgccctgacactaataaatcatttgggaactgcagtttggagtatttagtacctgttatgtggccaagaaggtaatagaggccactgagaccttttccagtctaatataatgggcacaactcacattttttccttttagttattaggtaaaaattagtgttggtgtttacttcagtgattttttagaggatttacaatttttactgtgaacacttagggaaacccacttcccacctcatcctatagattttccctatgtgaagggttttcatagtaccttggggatgaaaggaagtcccccaaataattttcctgatgtctgcttccaatatttgacttcaagaataccgttttccaaatagtatgttcagagccataccaggcacacagagtctctaaaactctggagagactgtaatatttctttgcttgaaggaagggatcattcttgtattctgttcagagattacattaatgatatttaaatgtttctcagaagataaaccaagtgttggaatttatttgcttttgaccctgttcagcaatattcaatgaataaaaaagaaaaaagtcttaatgatagttcttgagccacatgactttgtctaattaaaaaatattttgcaagtcttcatataaagttcaaaacaacaaaggtgaaatgatgggaattttcttaagaaaggaaattctgcagtgacccaatcctttgagcaatcaacagtcattctagggatactcttgtattgtttaaaattacattttacaaaataaataatgtcctaaatgcctcaacatttttagaatcagaaaagttgcttaactgggatgtccaagatcatttagctagtaagtagtgaatccagtattcaaaacccaggctttctagctcctgaacttgtcctagactcactactctaaactaaatctctgtttaatattacatgctcatatgaaatgtttcatgtttaaaaggccaatacattcccataaatggaaatatcctcatttaatataattaatatattttaattatggaagcatgataaaattatccaaagcaaggaattaaaatagaaggatgagacaagttaataatcttatgagctccatgaatacgtgttcattatgtgcaaaactcttcctgttaagcactttatatacagttaaccatcacaatctaaaccactcttcggagcatgattattaactcaatttttcaaactaggaatcttaggctcagagaggttatgtcatctccacagggtcaacagctctaaaatgtggagcacaaattgtaatgggaaaggccaagatgattattgacctgtgagccactgaaaccagtgtgaattgttctgtatggaatagaagtacacttcatgatatatattgtaactgttgctgaaggattttattcattttacattggatcaaatggaaatcgagctgtatattaaagattttacaaaagctccaaattaagaagaaactatagaaactcaaataaaatgaaattttttttaaaaaagtgttttctaagtagtgtttcataaagtaatacaaatttttagttattaggctgataaaataaatctatttcttttagtatctttgtcctttctttttgaatgttgttacacattcctgaaagttggaagatcagcgttttaaaataaatgctaggaaagacctaatgtaactcttgattattttacagcatcaagagttcttccttcttcttgcttattgcttgacaacagattgactgaggatgctttagagctgacaggtttggaggatgagggatgagtgagtatgagcaaaactctgaggaggagcactgcatgcctcaaaagaacttggagagaataagagttaccaaaaaaaaaaaaaaaaaaagattttgccaggctataattggaatgaagtgatataagtgacatgaatgatgcttaaaatgttgagaattaaaaagtaaatattaaaacattgaaaaacttttttttaccctttttggtttatcatcttccttctctccttcaacttccatttttttcattcagtttttcccctcattccaactcttctttctttaattgaacataatagagactcggagttcaaaatatgtgttgtttctattgaattgatagattttttttttttttttgagacagggtctctgtctgtcatccaagctggaccgcagtggtgtgatcatggctcactgcagactcaacctccccaggctcaggtgatcctcccaccttagctactctcaagcagctgagactacaggtgcacagctccatgcctggctaatttttgtacttttcctagagacagggtgtcactgtgttgcccatgctgttcttgaactcctgccctcaagtgattcacccgccttggcctccgaaaatgttggaattacaggcacgagccactgtgcctggtctattgaatggaatttatgtttatcctttccaattttaaaatagttaactttaaagttgtgtattttacattcattgtcttcaaaccaaacaaaatccaaaaacttttctactttttgaattgaattttttctctccttttgaataataaaacctggtcattgatgtatgtgtactcatctgatatttttgatttaacaaaatcaaatggagggttcacgttagtattttatgctttttaaaagtagacatgcttatgctcttccctaaaacttttatttcagcattacttagataagccctggcatctgtatttttttaggttacacagatgatttttttgtataccctggtcaatagccacagtggagtatacctgcattctgatatatacactcttgacaaccatagagacaaatgatacttagctgcatttttaacattacctaacataagtgaaagggattttaaaacagtagtattttggaaaacagcagataataaaacattaattttgtgttgtgggttattggtattaagtatcatgtaatgcccacatctcaaagctcactatggaagaattggtgtcagataataggaagattgatattgttgaaaaccatgcattcagcaagccagccattggtagcacccaatgaagtgttcagtattcatctaagcagagaaagtagaagacacaatctttactgtaactttgagtgtttgcagtgtgtcagatggtcccttgaagaagaaatattaataaaaatgaattgcaaattgtctccaatttacctgaaagagatcaaaataatgtatctaaatatatggtgtttgaaaggtgtagagtcagtccatatttttcaagcccagtgaaggtaacagaacagtttctacttaagcagctgtttgttggtttctttggctcaagagagaggtataatatcttcttttattttacagctttttaatcataataataactattataaaattaacaaatgcacatggtaactaattcaaacaatttttgctttatccctttaaagccattatctagggaataatcacttcccgcttttttaaaaaaaagtttttctgatattttcctttttatctctaaataatatgcttatgtctcatttttatttcatcaacttatgtaatgttttctaactttctaatttgaaaatgaggaatttattttatttatgtaaacttttctctttctgccccattctcaaattccaagcagttatgttttcatttctaagtaattctatgggttggatttatacctttaaatggaatatacctgaacctctatttcttgttacttaaactttagccaggatgcactaactgccttcaatgtaagataaggggtcagctctccaacttttccctcaccactaatccccctctacctctcaatttttgtaagctattccattacttttacactgataatatttaacacatatatgtgtatatcttgtctttgtgtaaataaagttctataattgtacttacattttatatatgctttggtaattggcacatttgtgagatgattaactgatacaatttaacaatattataattatgtatgtatttttcattttaaaacaagtaacatggtttgatctagaggaggaatttaaacctctcattcaaactctgctacttgaagaacacatcaaactcaagtggatcctctctgcttcaattctaccagttgttcaagttcatgcctcattttgaattgattcctatttggacaatatggctatttacacgttctaaagaaacaaattccctttgcttttattcacactatttgtgaaacatcttgtattctatgtgttttagaagtacttttttttttttgctctaccttaatccaaagtaacttaaaaaaaaaagataaaaaggagttaaattttgaattttcttatacctagaaatatattttgtttgccatcacacttgataataggttgtctgataatagaatttgattcaaaatattttctctcatcacactgaaagcattgattgtgttctagtgtcaattatggctaaggaaattttaatggcaatctaattttcattctttttagttagttatcttatttttggaagattataaaatcttgtttctattgttaatgctctaaactttcacaagaatggaacttttaaattgatcttcttttgtacttttagcttgatgactcttggtgaattttctgccattactttgtttattatttcctatctactatttgctgctctcttgagactaatgtcgaacaacatggattattctgtatcttctaagttttattttgtacttttttaatttttaaaattctcctaaaatatatagaaaaatctaagatatagaactccatgcatttttacatatacatattttcccatgtaaccatcacatagatcaaggtatagaacgtttctagcacctgagaatgctcactggtgccccattctggtaaagtgccccttttgggtaaagtaaaaggtaactacaattatgacttctccttttcagcaagcattctactgaaattttttgtttcacaaagcatgacctttacccagaattgatgttgttgtttttggtagcctattttttttttttaataaaagatactctgtctcctcaaatttctctaggaatactaactttaacttctcaatatcccacaatgtttgcttttttttttctaaagttaaaagtttggtctgttcatcttagtctttcaattttatgtttggtagatcttcattaccaatttattcttgataatctattaatatttatggaagaaaggccaggttggtgttggccaggtttgcatctgtctttatacaggtctgtttcccagacaaatcctctcttgaaagagagggatgactgaaaggtctgtgtatatacatgtatggtgtactgacaggcaggctacattttaggatgtatggatgaggagtagataagggagtcacctttccctcgactccaccctggttctagctaaaatggacatggataccctaggagtcctaccttaattaatgcagatattatccttttggtgatagcttggagataaaccactctgctacatatttaacatagagagggaagtgggacaatgttttctgcaacattattgaataaataatccatggattaatcaacttgttttctgatctacatcacatatttgccatagaaatctgtgacttctctgctagaaagaaattctaacattctcagatgagtgttctagactgtagcttctgctttgatctcctcactagggtaatcttatgatttatgataactttttttgtcttcctctggtttttagtgatattatctaacatttcgccactgtacatctttgtttttactgcaatggaaatttgaaggccagagagtgtgataaacacatgggataagaccattttcatgaactgggagctgacattgctttgactggaaagatgtgtgaagaaaaatagatgctagatagacaaatacatgatatgatatttggacagacatagatccatagatggataagcatagataaaacatatctatatatatgtgtgtgtctgcatacatagaaaataagaaagagttcagaataaatatttccatattgattttaactataggaaatcttagatacaagaataacacattcattttttaattttagtagttgcctaagtattctctaatatgagattaatggtgagtgggtaagatagtaatgagaaaacaaaagtactgcctttatatgcaacattgggatttcattctaaagaagatacaatcatagtaatgttaataaaagtggaaatgtagcaatatatttttcaaaattgtaaattaaacatgacaagaataaatattgattgatttcattgactatataaaattaggtcaaataattttaaatgatttttttcaaagtatattttctttcttctggatagaaaaacatgacattttcgttgtacaaatttgaaaagtaaagtataaagacataaaaataatccataatctcttaactagggctaaactttgttaaatgcattgtgtatttaaattaaatatcattttaaaaattattattaatttacatctatctgtgtgtataacctggattccacttattatgcattatatttttataattcatttaattcattaaatagtctttgaacgctctctttcaaagctgctcattatttcattatacattcattacttcatttagtgtaacccttactgttaggattttggattgattataatttttcaatattataaaaatattgtagtaaatatatttatacatgttagaggacacctgagattactgtctttgaataaattcctagaaggaaaattatttggcaatataaacgaattcacgtgtttaaggcttttgatagatattacaaaattaccctcaaaaagtttgtacactttatttatttatttgagacggagtctcgctctattgcccaggctggagtgcagtggcacgatcttggctcactgcaagctccgcctcctgggttcacgccattctctgcctcagcctcccgagcagctgggactataggcgcctgccaacatgcctggctaatttttttgtacttttagtagagacagggtttcacagtgttcgccaggttggtctcgatctcctgacctcatgatctgcctgcctgggcctcccaaagttctgggattataggcgtgagccaccgcacccagacagtacacattatttattactttcatccagacaggcaacactgatttcccctataacctctctaatatcactattacttttgttaaaatctttgctaatgattaataggccaaatttggttccccatgtttattttaatatttgtttctttgattactagtgaggtttgacatggttacaagtgtttattaaccatttgtatttttagataattatgttttttactaaattttatgagatatattaatatctttattcattaaaggaaaagcacttcatctgtcatttgtattgtactttttttattttgtggatgccttccacttttaaaaaccttcattgttatgagattaaatctagcattctttatctttttcgattttgcctttggtgtaatgctttacaagtcctctctactctcacattaaataagtattcattttcacttttattagaatgtttgagctttatttttccatttaaatatttactccaccagaaatctcaaatcttaaactaaatgcctgactaatgaaaactcctgtggcctgtttatccagaagactaagggaagaggaaagaagttgtagtcacacataggtcctgccccatcattgcatcttctttgtgtgtgttggtgaagtgtgaggctccatttttacttatgttgccctctgtaaccctgtcagcctatcatcttgccaccccactggcctggtacaataacttccaagcaaactcagatgccaactaaagctgctcttcttcaaagctataaaattagtaaaatgaaaggaagtttcacctctccaaactagaggatgatgatgaaatctgatcaaggtctcttcaacttccatttcacagatcatgatgttaagcaggtgcttagtgtcttcctttaatttagcttgatcagggaaatattgcccatgcatggtaccactagcattgaccaccctttgcctctgcttttttcatatactttagtcattctggagctgtgttgagcatgtgcatgggggttgggggagacagagacagaggagaataggaatattggaagaatcaaactggtaatggacatctgagttcacaacatctttgtacctagatttctgtcaaataattcttgaaagagatggtaccctccagttgaatgtagaatctacaaaaacaccagttattcaagccaacttttcttcaagagccacagtatgtctacactgaaagtctagtgaggcaagttatcccgtcttctcacctttatgatttccaaaagtgttgaggaatctccaaagcacaagtggcaactgctttgatttgattcattgatttgtttcctttttactaaatctcttcctattctgaggacaattttcacatattttaggattcaaaattcttaatgcatattcatagtagttttattaagatataatttacacaccataaaaaatcaccattttaaagtgtatcactcagtggtttttagtatgttcacaaaggtatgcaacaatcatcattatgtagttttagaatatttttatcaccccaaaagaagccccatactctttaaccattaaccacataaccatcaataatcacttcctattacacccagcctctgacaaaaaatactctacattttgtttctggggatttgcctattctggacatttcataagatggaatcatatcgtatgtggccttttggctctgtgttctttcacggggttttcatcacatccatgttgtaacatgtacctatacttcatttgtttttattgctaaatactaattcagtgtttgaatatcccacattcctttatccatttattcattggtgagtaatgaggttgtgtttactttttggctagtatgaataatgctgctgaacattcatgtaaacgttcttgtgtggacatatgttttaaattcccttgagtctgtaccaagtagtggaattgccgagtcataacttactctttacctttcagaatcatcctacttttgaatgtgtatatgaaatatcccttatttttcactacattctttaaaaacctttatcctaactttggtttccatcaaaatacaggcatacttcattttatggggctttactttattgcacttcaagatactgcattctttacaagttgaaggtttgtggcaaccctgcattaagcaagtctgtcagcgtaattttttcaacagcatgtgctcacttcatgcatctgtgtcacactttggcaattctcacaatatttcaactttgtaattgccattatttaattattactgtatgtgttatggtgatctatgatcagtgatctttgttgttactgtggtaattgttttggggtgctatgaaccacatccacataagacagcaaacaatcattaaatgtgacgtgttctgtttcagcatccctatctctctccctttcctcaggcttccctgttccctgacacacaacgatgttaaaattaggccaattagtaacccattcccacccctaatgttcaagtaaaggaagaattgcgcatttctcactttaaatcagaagctagaaatgattaagcttagtgaggaaggcatgttgaaagccaagataggccaaaatctaggcctcttgcactaagtacttagccaagttgtgaatgcaaaggaaacattcttgaaggaaatcaaatgtgctactccagtgaacacatgaatgataagaaaacaaaacagccttattgcaaatatagagaaagttttagtgatctagatagaagatcaaccagccacaacatttccttaagccaaagcctaatccacagcaaggccataactccaattgtatgaaggctgagaggtgaagaagctggaaaaaaaaggtttgaagctggcagacggtaccccatgagattgaaggaaagaagtcactgccataacataaaaatgcaaggtgaaacagcaagtgccaatggagaagatgcagcaagttattcagaagatctagctaagatcattgataagagtggttacattaaacaacagatttgcaatgaaggtctaacagccttctactagaagaatatattatagctagaaaggagaagtcaatgtctggcttcaaagcttcaacgaacaggctgactctcttgttaggggataatgcagctggtgactttaaattgaagcaaatgctaatttatcgttcagaaaatcttagaattatattatttaattattcagaatattaataattatttactattcagaaaattacataataattatattatttactattcagaaaattacataataattatattatttactattcagaaaattaaataattatattctttactattcagaaaattaaataataactatattatttaattattcagaaaattaaataataattatattatttaatcattcagaaaatctcttaagaattatactaaatctactctgcctgtgctctataaatagaacaacaaagcctggatgacagcacgtctgtttacagcatggttcactaaatattttaggcccagtgttgatacttatagctcaggaaaaaaaaaaaagatttctttcaaaatatcactgcctattgacaatgtgcctggtcactcaagagctctaacggagaggtacaagggcattaatgttattttcatgcctgctaacgctatccattctgtagcctatgggccaaagagtaatttcaacttttaagtcttattttttaataaatacattttataagactatagctgccatagatagtgattcctctgatgggtctgggaaaagtaaattgaaaatcttctggaaaggattcaccattctagatgttattagaacattaatgatttgtgggaggagggcaatatacaaacattaataggaaattggaatgagttgattccaactctcatggatgactatgagaggtttaagacttcagtgatggaaagaactgcagatgtggtggaaatagcaagagaattagaattaagagatggagcctaaaattgtgactgaattgctgccatctcgcggtaacttgaatggatgaggagttgcttctgattgataagcaaagaaagtggtttcgtgagatggaatcttctcctggtcaagatgttatgaacattgttgaagtgacagcagaggatttagaatattacataagtttagttggtaaaacagcatcaggctggagagtggtgctaccaaaggcattatcataaagacttttaaaagaggaaagttgagttgaattgcaccaaaggtaaatatagacgaaaagaaggggaatttaggaaaatttactcagaaaattgtcattttttactttaaagctatgaagcgtaaacttcaaatttctgagtataaagatggttagaaggcacgaaagataagtcccgcccattgcctgacacatagtaatcccttaacaagctgataattctagaacatgttaccttttgtagttgaaactaaaaatctgtttatgttgttattattagtttttaatgggcctttcttggcaggcaaatagttaagtctttatttctttgtttccatccaggcctcttatgtgaggagctgaagaggaattaaaatatacaggatgaaaagatggcaatgttgcctcccccaggacctcagagctttgtccatttcacaaaacagtctcttgccctcattgaacaacgcattgctgaaagaaaatcaaaggaacccaaagaagaaaagaaagatgatgatgaagaagccccaaagccaagcagtgacttggaagctggcaaacagctgcccttcatctatggggacattcctcccggcatggtgtcagagcccctggaggacttggacccctactatgcagacaaaaaggtgagtttattttgacttcagtggtcagtttctgttggcttccttctgtataaaaattattttaaattgagattagtgaaatttagtgaataaccatatcatgaccagaatgttaaattaaatatatatatatatatatatatatatatatatatatatatatatataggatattcagaatctgtactttttcaaatttttcattgaaattggctctggcattggcatactacttttaatttttttttttaattatactttaagttttagggtacatgtgcacattgtgcaggttagttacatatgtatacatgtgccatgctggtgcgctgcacccactaactggtcatctagcattaggtatatctcccaatgctatccctcccccctccccccaccccaccacagtccctagagtgtgatattccccttcctgtgtccatgtgatttcattgttcaattcccacctatgagtgagaatatgcggtgtttggttttttattcttgtgatagtttactgagaatgatgatttccaattgcatccatgtccctacaaaggacgtgaactcatcattttttatggctgcatagtattccatggtgtatatgagccacattttcttaatccagtctatcattgttggacatttgggttggttccaagtgtttgctattgtgaataatgccacaataaacatatgtgtgcatgtgtctttatagcagcatgatttatagtcctttgggtatatacccagtaatgggatggctgggtcaaatggtatttctagttctagatccctgaggaatcgccacactgacttccacaatggttgaactagtttaccaccaacagtgtaaaagtgttcctatttctccacatcctctccagcacctgttgtttcctgactttttaatgattgccattctaactggtgtgagatggtatctcattgtggttttgatttgcatttctctgatggccagtgatgatgagcattttttcatgtgttttttggctgcataaatgtcttcttttgagaagtgtctgttcatgtcctttgcccactttttgatggggttgtttgtttttttcttgtaaatttgtttgagttcattgtagattctggatattagccttttgtcagatgagtaggttgcgaaaattgtctcccattttgtaggttgcatgttcactctgatggtagtttattttgctgtgcagaagctctttagtttaattagatcccatttgtcaattttgtcttttgttgccattgcttttggtgttttagacatgaagtccttgcccatgcctatgtcctgaatggtaatgcctgggttttcttctagggtttttatggttttaggtctaatgtttaagtctttaatccatcttgaattgatttttgtataaggtgtaaggaagggatccagtttcagctttctacatatggctagccagttttcccagcaccatttgttaaatagggaatcctttccccattgcttgtttttctcaggtttgtcaaagatcagatagttgtagatatgtggcgttatttctgagggctctgttctgttccattgatctatatctctgttttggtaccagtaccatgctgtttgggttactgtagccttgtagtgtagtttgaagtcaggtagcgtgatgcctccagctttgttcttttggcttaggattgacttggcgatgcgggctcttttttggttccatatgaactttaaagtagttttttccagttctgtgaagaaagtcattggtagcttgatggggatggcattgaatctgtaaattaccttgggcagtatggccattttcacgatattgattcttcctacacatgagcatggaatgttcttccatttgtttgtatcctcttttatttccttgagcagtggtttgtagttctcctcgaagaggtccttcacatcccttgtaagttggattcctaggtattttattctctttgaagcaattgtgaaatttagtataatgtttagtataacatagtatacattgtttagtataattgtttagcataacatttttggacatgacacagtgatctgccaaattttataatcatacctattttttcctgctaataattaactctcatgtgtatgcagacccaaaaatcacttaaaagtttttaatgagaatgaaaattgctaatttcaattttaaaataccaacaattctttttattaaaatttcaagtataaggtaacttgatcttgccaatactatgtagtatgttgtgatttttcatgttagctcagatgacctccggtttataaagtctccctgataattttgacagtcatgtgaccctgttccctcttcactctcattcttccccctttatatttttctgtatgatatctgtcacatcttgccttatattagttactttcttcttttcatttttctaggaagttccttgaatacaaaactcatgccttatttttgttcaaactccttttcattacctgttatgatatagtttctgactatacatgtattagtcttttttttttttttttttttgagacagagtctccctctgttgcccaggctggagtgccgtggcgcgattttggctcactgcaagctccgcctcccgggttcacgccattctcccacctcagcctccagggtagctgggactacaggtacccgccaccacacctggctaattttgtttttgtatttttagtagagacggggattcaccgtgttagccaggatggtctcgatctcctgacgttgtgttctgcccaccttggcctcccaaagtgctgggaacacaggcgtgagccaccacgcccggccgtattagtccatttttacactgctataaagaactacctgagactgggtaatttataaagaaaagagatttaatttactcactgttctgaatggcaggggaggcctcagaaaacttacaatcatggtcgaaggcaaaggggaagcaaggcacatcttaacatggtgcaggagagggagaaagaggagggaaatgccgcacttttaaacccatcagatctcatgagaactcactcactcactatcatgagaacagcactggggaaaccgctcccatgatccaatcacttaccaccaggtccctcccctgagacgtggggattacaattcaaaatgagatttgggcggggacacagagccaaaccatgtcaatacaattgcagaaagaatggatgaataattttttaaaaatacagtctactgagatttaagacaaaaaggattgtacttgaggactaggtattaattttaaaataattttccatgtaaaagtgaattttacattaaattgtatttagatagaactgatacagtgaaagggagcaggaaaataaaaggacacctgaaaacaatagactctgatttgttttcttgagggaacgctgccgcatacaaataaaaagcctgactcacagacttacctcctgaatacggtgagaaatgcttattgccagaaacccactgataaccctatataaaatttagaaagtcagtgtctttcagctaacacaagtcatcttcctgccaaccggagaaaaataaggctgggatttgaactttgtctttctgatttctaagccaatgctttaggttgctttaatattttgttgttactgctggttgtttttatttcttaactgaatactaaagctatggaaaaggacacttatggaatggctacaataacatttcaagaatgtttgcttctattcatatcgttttttaaattaccgtggttagtaagtgaggaatcctcttaatttaagtcccttttaaaagctaatattagtattataactaaaataaagaaattgaactcagtgattggaaggattcttccaactctgacgttccttcaacttaggaaaatattttttgaaataactcatattttggaacatgtgctgctaaccataacaattgccagcaagtattaaaattctcaaggttttatgataaaaatattagagatagctagtttctatttggctttcttaaaatgcagtgtaatggaagggaaagaagttgtactttaaaataacttaaccacagttattgttactggtgaaagaaaatgaaaaatatgaaatacagtattttgaaagctctaagcaatacatgctaacaaatagctcaatttttaaagttactatgaagaagtggacttggagttcattggccaaggtgacattgatagatgcgttgatgacattggaaccacattgctggagtctgatggcagtgtttcttcaatataacactgccatgtagaaaggtaaactgctgatattgatgtgaaaaattgatattttggattctcaatttcatcctttctttttcctcctgcagactttcatagtattgaacaaagggaaaacaatcttccgtttcaatgccacacctgctttatatatgctttctcctttcagtcctctaagaagaatatctattaagattttagtacactcatatccttttaaaaatgattacatccagtggcactttatggtgtaatttttgctattttattcaaatatagatgttataccttttgcaccttgaaagactctggttttagtttattaatttcagtattattaatataatttgtcatgggtctcagagaagactgggagagtggcaatattaagattttaggatatgttacttttatttattactctcttgttcaaagagacaaaatagtctacaagctcatttagaatttttttcttaggaaaagttgtaagcatttcaacaagtgtcatcctcaaatatttcaaattcccactgtcgtctcttttgttccttgattctaagctaccttattcagcatgctcatcatgtgcactattctgacaaactgcatatttatgaccatgaataacccaccggactggaccaaaaatgtcgagtaagtgggtataagtacattttaatatagttttggtattatcatttcatcctttccttttcctgccaggaagttactgcatttatgaagatggggaatctttaccttcccatgttatatgcttgcttttcttttgttctttacctcctctatgatattaacctgctagattagaaaaattagatgctacagtgttttctcaaagaatgaacttgtcagatgctccatcctgttcttagacatgttacacatattttattcttgggtgtatgttttataattatatgggtgtatttttaaatgattgggtgaatttttgatagaagcaatgtaggaaatttttaggcagatctgagacctatattcttagttatttcaagtacctctgctttctgggagtgtttctgatattgacattttaatattttctggatagacctattgtagtttaatagggtgtgtccataacccaacagccatcctccaatatatgtcttccagtggttaattagagaaaataagttataaagatttacatggtggttgtattcttttcacatctagtatcccaatggaatcttgtgtttaggtacacttttactggaatatatacttttgaatcacttgtaaaaatccttgcaagaggcttctgtgtaggagaattcacttttcttcgtgacccgtggaactggctggattttgtcgtcattgtttttgcgtaagtactttcagctttttgaaacggcaaatttatgaaaatctcaggcagcacagtgttccaataacagcaaacctctggggtctgatttttccagcatggaatgtctgtatttaaaggaaaatggaagctatatgaaagctagtcattgataggcaaatactaaatttttcaaaaagactatctcccactcagaggtatgtgacatcattgagattgatcatcttcctccatgctcagcacttggatggatagtctatgcagtgccaattaggtttacactttttccaagttcttgtttaaaaatgaataaaacctataagaagcacacaaaaaactcaggcctttaaatacaagtacagtgctctttatattaccctgtattattcaattattttatatttttgtattaaaatataaaagtatatatttgtaaaagagctgtcactgcttactaagcctaagattaatgcattgtatacacattatatatacactcagtttattttcaaggaaaatattacattacagtataattttaatttattcataattgttactcttttcccaaatgtatttatcagaaaaatggatttttacaatctcatatctagatattctattttccgttaatgactttgaattatcaaagtaatccaggttcactggagccacctagacaatacagaagggtcttaagattcctaatatccgattccttcatccctgcctaacctcttttccatcaggctccctccttttgaggtcacatatgatggggcagttccatctgctacctgctgctaagaaaacattgtgcaaagaagactgcctcttctcataggtctcctttttttcctattggtacaattcaaatactacaaaattcacaattttaaagtatacaattcagtgtttttcagtatattgacaaacttgcgcaacatcaccactacctaattagagaagtttaacaaccccaaatagaaactctgtactcattagcagtcacttcaatttccttctctccctggccccttggaaaccactcatctatgttttatctctatggatttgtctatttggatttttttatgaatggaaatatcaaacagtatgcagccttttgtgtctgacacttagcatactattttcaatgttttataaaaaattaaaagtctaaattaccataatgttaagggtccaacaattgaaacatttagttgtttacgcatttaagtgtatgaatccaatttaataatatataatatctgtattttgtttgcatcaaatgagtcaaatcaatgctaattaaattaagttagttatgatagcaaaaaagacttgcagaactatacatttaaaatagaagccccaaacgtagaaaataccttgactaaaggctcaggtaagtatcatagactctatctaaattctgaataattctgatttaattctacaggtatttaacagaatttgtaaacctaggcaatgtttcagctcttcgaactttcagagtattgagagctttgaaaactatttctgtaatcccaggtaagaagtaattggtgtgaagcattaggccactcataactccaactatttgggagttgttctttgttcgtttgtgtgtgtgtcgtcactgtgtgtataaactcccctattacagatatgtgacagagtttgtggacctgggcaatgtctcagcattgagaacattcagagttctccgagcattgaaaacaatttcagtcattccaggtgagagtggggttaaacaccagggctgactttgatcttttgaaagaaagacataaaaaaaacctttctttatgcaattttaattaaatttgatttcttctgttttccacaatcattatcaaaagtcaacctttgagtttaatcaattgcatgggtctttaggatgaggatgactacttggctcacatctcaacttgaaatcttccctcctgtctgagggtttgtttttccatttgcttatacaggaaggaaaatttcaatccattttaattgattttaaaatacttaggaaagagatcataaatatcagcatggggatattgcatgacattgttttttattttttctcagcaaaccatttctttattgaaaattattacaaggtgtcactatatgctgtaatttgttttggtgccatttatagagaagtggtttgtttgacaaacattagaacttacaaaaattatttttaaagtggtttgaatagccaaattgttcattttgacaacctaggtattctttgagaatatgttcctatttttaaccatttgctgtaatatataaaaacaaagtatatataaaatagcaaacccagaaggctttttttgaattaggttacttaaggtcattgatttgatataatgcatgactttctaggaaagcttgtgttttttgtttcgattcagaggctttatgtcattacaaacacttttttctcccattttcaggcctgaagacaattgtaggggctttgatccagtcagtgaagaagctttctgatgtcatgatcctgactgtgttctgtctgagtgtgtttgcactaattggactacagctgttcatgggaaacctgaagcataaatgttttcgaaattcacttgaaaataatgaaacattagaaagcataatgaataccctagagagtgaagaagactttagaagtaagaatgtccttgcatttgttattaggttgaaataatgctaaaaacattgctctcttttaataatgaaatgttgctttcattttaatcatttcaaagctattcaaatatatagaaagctgctacagtgtgaatttgggtcatgttatatatgattttcataaatcatcctggttctaagctatctagcagtactggcaaaaggaacacaggatagttccataattcctaatttctatatcataaaaaagaattattttctctagagaaataaatgtagccttgaattaataacattaaccattacatttaacaatataatagattatatattttatataattttattatatagtacatacttatatttattatatataatgtgacatatttattatgatagatttttatacttaatagattgtactcataactataacatcttaaagttctattaatcatatataatgataatattaattatcaaatataaagatagtatctgtatcttgatagtattcctaaagatttgtacaaagcaaaatcatttgctcagctttatcaacatccactttgtaaccaatgacgagtttcatagctgtttttaatggcttccttcaatataggctgatggcaagatatcaaagtttagttcagtagaattatttctgtaggtaccacatgagatcatctgtatgcactctcagaagtctgcttaattcagaagtatcaattagagtttcttacataaagcatgaattgaatgttctctaaacaattatcccctagcatggtgtctctcactggaacggttgatgaatattggatgaagatatgatcaagattgtactttctgtctgacacctggaatgtatctatctgatggtgcccacgtgaatacataaatcttaatagataatttgacccaggtgtggtatggaagtcacgaaacctttcaaatatatgtgctgttgccaaaaggaaatgagggaggaaaggtcaggattctccttagataataaaaagtaatatacatcattttcttattttaccaaatgtgtcctttctcactcactgtgataaataaaatcaaataacacctagcccacatggtaaaagactataaataaaatgacagaaaaaaatagaagccttaacaagaaaactgaaagttttgaagtaaaatgtttagcatatatatttttactaccaccatttgatgaggaatttagcatattttccccttctttttatatttaccctcttttccagtttctgattgttacaaacatgatttgaaacttatttccaatggatggagaattttatttcttaatttatatgctgtaaaattaatatatctgatgagtaacttacatttaatattgtagattattttaccacacttatttaaacttaagttttctcactgggatctgtccttttattctgagtcttgctcctatttctgagtttatactgtgaatggttttcttaacctttgttaaaagaaaaattttcaacaaattaaatttagcagcttatttcagcaatgaaatagtatttattgctgaaataagataataataataatgatttaggcagcactcagaaccaagagaagttcggagagctcaactcagcaacatgagcaggagtatttatagacagaaaaagggagtgacgcacaaaaacagcttgattgcttatagcttgacatttgccttatgtggacattgtctgataaatcagcaggctgtggttggctgaagctcagctgctgtgattggctgagacagctacttgttacaagaatatactaatagattagaatgcaatttgtttacatatgaagttagattgcaattctctatgtacacagacagcctttaatcaaatttaatttaattcatcgctttctggaattgcttcatgtatttttttttttttttgctaaaaaataatacaaaaaaagaagaaaaaaaaagaaaccccgtctctactaaaaatacaaaaaattagccgggcatggtggtgggcgcctgtaattccagctactcaggaggctgaggcaggagaatcgcttgaactcgggaggcagaggttgcggtgagccgagatcgtgccattgcactccagcctgggcaacaagagcgaaactgtctcaaaaataaataaattaataaattaataataataatagagcccttgagttatgtgaattatctttatattatatttaaacatgaatgcatgacaattagctaataatgaatcttataccacaatcctgtcttccaaatctgtacattattctttattttcttctgaaatgtagttttagtgaagaggtgtttaaatcaagtctgaattttgcttctgtttcctatgtcatagaagccatttttgactgcataattgattcaaactttcatttattggtgcgtttattacatggtttccctgagctatagcaataaatgatagcctcagcccttgctttcacagagcttatcatctagtgggaatgaaaaaaaatgtttaagggggaacagacaaataaattaaaaatatctcaagttataataaatgccatgcaaaggaagtgagtctcaggtgctgagatatcaactagatgagaagacatctctgaggtgatggcatttaagctgagatctaaaagatagtaagaagccataaaatagtttaagtgtgggtgtgagtctatgtgtggggggtgctgcttcaattaggagaaatagcatgggcaaaggtcctgaataaagggagggtatgggtttaaagaatggaaaaacagcagcgtggtttggtaagagaaaggaagaatggcaacagagaaagtagcagaaaaaataggggtcatatcatgcaggacatttcagcccatgggaaggagtttgtattttattttaaatgcagtcatttttattgctgtctgtcttgtgcacaactgattgagcaagggtagatggtagatgggaataagaaaggtaagttgaaggttgcttctctcatctaggcaagagaaaataaaggtttcatctagagtgatggcagagaaatgaagagaaaaaagatgagctcaacatacaaagtctgtagagcttgctgatggattaaagaagacaggaagcattgaggatgacttctcagtttctggctgcaataactggatgggtggtgatggttaatgaggaaatggtggacacatttgtagaggaaggtcactattagctagctaaaattaaaatgagatgcctttgagatgtccaggtggatatataatatagagaattggagatttaagtatagaaatcagagggcctgctgagtttggagataaattccagagcaatcagcaaaaagaaaggacacacacacctctacctctgaacatccctgatatttttaagtagatagagaatgggaaacctggtatttaaagcaatctggtaccaagatctacaactctgacatttagaattcaggtagaaaagaggacccagaaaagaacacagagaaagagccgccaataaagtaagaagcaaagatataaataatgaagccaagagaagaaaacatattgtagaaacagatgtgcttgtgtagaatcatgctgcaagatcaaggagtaaggatgatgaagaaagaaatatgcattaggttaagtaacagggaagtcatcagagaatttcttgagaaaatttgggtaagtggtagggttcaaggtaagaataaggtgcatacaggggtgaaaagaagaggtcagaaagaaggtaatatgtgtagacaattctcccaagaaatttggctataaagggaagcagaataatggggcaaatggctggcatttaaaaaaatatatgggtttttgtatggatgttttgctagtgataatgaatgagtagttatatatgaatcaattcaggagagagagggagaagtcaagtcctcgtgaaagtgaaagagtaaaggggagcgacagctccaccgaaacaggaggaaagatagaagagaagactgcagagttatcaaaagatgattgagttcaaacccaatggtttttatttcctcaaagtataagatgggatcattgcctgagagtgcaaatgaggaagagaaaattctacagatgatttgatgagaatgcattatatatatggtcatatcagggcatgagaaatttagtgtattttgagtgcaaatttgatgttggagattacttacttaaaatataaccattcacttggttgtgagagtttctccaccaacattcagccatttggtagccagcatggaaaagacagatgccagattatgtgtagactgtggttctgccaggttaggcactgatgataatgaatgcccatggatttaagctgtacaaagagtgacaagaacttggttgatagatcatgagaaagtgctaaggcaaatgaattggcaatatttaaaagatcaaggaattataatggtaaaggcaatctacacagagaacctgagcataatctaaaagcattttctggtgcctatagcaaagtattttccgaaatgcctttccaaattcacaatcaaataaattaacccactgtctcacctcctgctgaaaaacatacaatttgtagatttcctttggtgttgctgtctactttgatgctcatcaaacacttttttatgctgctacagatgaaagtggggttcatgtgcacagtgtgtagctaaatgtgcagtattatggagaaatatactgtggttatattgggctaaaacaggatattctcttcctcctgtttttctaatatttgacatttaatagagaaagttttgaaaaaaccgcaatattggccttcactactaacaggaattttcctatctccttcatctacagctgttttcttgtgagaactacatttgccagagtgtagagtatcatgtgcaggccctctgcccagtcctgatcccctgcactagttttctcagagttgcattatttgcccttcgttggggatatactcttcacttccataggcccaagccatacacaattgtcataagttgtctttctgagcaagggcagaattaccatttttttttctattttgctacattaatcttgaaaattaatttaaaaacttcacccagaatcttcattagatttaatatcaattctgtatttttgttatatcaattttcattttccccatacgtattttagtgataagttggcatttatttacccccacccacaacctttgccgttatgctgcattcccttttaaaaataggtttattgaggaataatttatatgccacaaaattcctttttttaaactgtataactcattttttaaactatactcagagttgtgcaacgatcgccactatctaatttaaaatattttcatctttcccaccaagaaacccagggcccgttagtagtcattccccatttcccttttctcccagcccctggcaaccactaatctactttctgtccctagggatttacccactctgtagatttaatatacatggaagcatataatatatggctttttgtatctggcttcttacacctagcataatgttttcaaaatttatccatggtatagtatgtatctatgcttcatttctttttattgctaaatgatatttcattgtatgtatatgctatattttgtttatacattcatcagttgatggacatttgggttatttccgtcttttggttataatgcataatgttgctgtaaacattcatgtacaagtttttgtggaaatacattttcaattttcagttctcagtatatacctagtagtgggattactgagtcatggttctttttttttttttttttttttttttttttttgagatggagtctcactctgtcgcctaggctggaatgcagtgtcgctatctcggctcactgtaagctccgcctcccgggttcacaccattctcctgcctcagcctgccaagtagctgggactacaggtgcccgccaccacgcccagctatttttttgtatttttagtagagacggggtttcattgtgttagccaggatggtctcgatctcctgacctcgtgatctgcccgcctcgacctcccaaagtgctggcattacaggcgtgagccactgcgcccggccgtgattcattctttatctttcagaatcatcccacttttgaatatgcacaagcaatatttcatttttctttgcattcaattttttcccatttttaaagatgttaaccttaaatcttcttgaagccaaccatcttaataatttaatgtctagttgtttagaaattattgtaaagttttctacaaacctagagtgagctacctgcattgctttacctttcatcattcttatactgtgttaaatacagtagtatagcagtgtgctaatagacagctccagagcccattcatataattcagctcctcagtggttgataaatgtgaaccagcattagtttaaaggataattctaaagtaatccatccttattaaaatattttggatgtttatgtatgcaaaattgcatcttatcctctcccatactcactctaccaggcccatccttcccgaggttcaggagtgttttcaggaaagcttttcatgcacattttcacctacatttgcacctcaaactgcaaggctttattgttttatctgtgtcttctaagtaagataaaatgatgatgtgtaattcaatcaatagttttatctcaaattgtataatagtttaactaattataataactcctgtttttgagcagctagtacagaatgtgtggatcacagtatcaagtggtttacatgcaatatcctatttatactatttaacaactttataaagtaggtattcttatacgtattttacagatgcagcagctaaggcttaatggcttaaagataattcacttacttaagaagggatagaagcaacattcaaatccaagaatatctgatttcatagtctttcttccatgattactccaaaagtctcccaataatcagattttttaatttgacctgagtaaaataggaagtcaggttcttatagtagaatagatatttaagagagatgacaaaaggttttttagtcatttaaacatttactatacaaggatagatctgcccccagtcttaggaacaagccttaacagcaaatgacagaagagttgatgagaacttttactactaaaaattagcacaaagaataccatgaaaggtgaaacatggaaaatctgcattgattacattgtcatctcctcaacacctagaattagtaggtcctaagtaagtatggactggtgaatgaaaagtaagataattttagaaaacaaattttactcacttatgttactgccttactgagtctgcctcttccggagtattgtaccacataaggatgttttagtcaatagcggaccatatatataatggtgatctcataagattataatactgtatttttttactgtaccttttctgtctttagatacacactttccattgtataacagttgcctacaatattgagtacagtagcccactctacaggtttgcagcccaggagcaataggctataccacatagcctaggtgtatggtagcctataccatctaggtttgtataagtgcaccctaggatgtttgcacaaggacgaaacgtcctaatgatgcatttctcagaatgtatcacagtcattaagtgacacatgaccgtacctttaatcatacttaaaatccaaactcatttctatgatatgcaaattccgacatgatccggcccctgcctacctctgccatcacaatcctccctctcaccacactgtagccacactggccatcttgctggcttttccacacaccaacttcatctctgccttagggctttagttctttctcttcccccagcccaaatatctcttcaccagtattttcatggctgtcttctttgtcacacttaggtcttagtttaaatatcatctccttagaaagaccgtccctgactgcagcctaccacgttgccttaatttattttctttagatcatttatcactatctgaaaatatcttgtatatttatttatttacttaaatttttatccaaccacaacctccaccctcacctaaacataaaggaggtctcataaaactaatgattttatttatcgtgtttattgtcatgtttattgcctagcctctaagagattatcaataaatatttgagggagaatatatgagaaaatagtaaataaatggatgcatattgcctgggaccaggcctgaatttgtagataaatgtctatatcaattaatttacctcctttatcacaatcacagattaaagtctgtgatgttataactgttcaaattcttcttcaacagaatatttttattacttggaaggatccaaagatgctctcctttgtggtttcagcacagattcagggtatgtaatatttgttttctttttagtctaaaggctgaaagagaaggaaaagaatgttcagtcagtttgcaaattagtctttgattctatattgctttttatatatttcatggtattatttgactcattctgtcccacagcaaatccagtctttaaaatgttcacagttaatgcatactcttgaaagcaagactttgagacagtgctcgaattaacacaagacagaagtcatataaatcttaagaaggtagaaaatgttacttctagaaaactccaccaaaagttggttggataatttcaggtcttctttctggaaaacgaagagtcacaaagtctatttttctttctactcccaagttccactcattctccaattaaatgtgactcataggtgactgaatgtcatgttttggccactctaagcaaagggattccttggacttgggtacacatattttaagaatattgtatatataagaatattgtatatattcaactgtccatcttgctgcttctctcttacaccaacttcattttgtagcatcagctgcataagctcttgcttttccccctatgcagacatctattcatcaggctctgtgtacactggcaacataggaataaactggataaggttgctgttcccagaagaatctcagaatattgtatttatttaatggcatcaggaaaaaccagtccaccaattttagaaagaaaaaagtcttaaagctgcacatttttatgaacttagacaattactatattttgactattattgactctaatctattccaagaattatacagacagaaagagctttggtaacagcctacatatcaatatttactgaaccaagaactatcacaaaacgtctgttgaaaatttccatgttttaatgatgatgatgctaatggcagctatgatttattaaacactttctatgtgcaggatgtaagctaagtaatttgtacacattatcttatttaaacttattacaagtcttattttcttgaggtagatgttattatcctattttcacagacagacttatgccttgaagaatttggtaaagtcactaagtagtcagtagccaaatcatgtattcttaatccttattcaatattgtccccctatagaagaaaccttgagtttgtaacttttcagtaaggctatttagcttgtgtcctgaagacactctcacctataatgttctttctcgtgtgtagtcagtgtccagaggggtacacctgtgtgaaaattggcagaaaccctgattatggctacacgagctttgacactttcagctgggccttcttagccttgtttaggctaatgacccaagattactgggaaaacctttaccaacaggtgagtaccaagagaaacatgcattgtatttttgaatggcatatgtacctggtgtatgttaagagcctgtattaggaggttttttatttatttgagaatggaggaaactctattatcttattaccaaaattataagtgttttactcccatcactaataatatgggtagttctcgaatcataaataattttcttatcttttctgggcatatttaatctctagatctctcgccttcctgagtatatcatcccatggggtcctagttaagtaccaggacatactgtaatgttttctcaagctgctcctgcacatggactgttttccatgcgtgcttgggatggcctgaagagaagaggctctctgatgttcacctgctcaccatgttttatttttgaactcctatttaaagttaaagatgcaattcatttctctaagtttttctctcccaaatcaattgctcccaactgtagacttccatgattttttgtattttcttccatttatatcattgatctcttgtattgcaagtggtaattcatgtggctatttcctctaacttgaatgtgaacctcttggggctgtggtctccatttacttgtatagtctcagcagccaagccaaaaggaaggagaccaaaatgattattctatagtacacataacaatgattcacttttctcagaatagctgcagatctgtttttttttcttttttggcctattttatatttactttatttccgagaatattataaatgaattcggaaattatgtaagatgcactttacagcaaaaatgggaatgcaaatattttttaaatatgcaagaagtggtcacctttactcaaaattaaagaaacacaaataaaaaaattaaaataatttttcatcagaggtaagacttatttttcatttaatatcagttgatactatcctaaattcactttaaaatgctttgtatgataaaagtatattacattatacaattattaatagaaatgttaattatcttataaatttgtttaagttacttgtagattcttaatattagacctttgtcagatgggtagattgccaaatttttctcccattctatagtttgcctgttcactctgatgttagtttcttttgctgtgcagaagctctttagtttagttatatcccatttgtcaattttggctttggttgcaattgcttttggtatttttgtcatgaagtctttgcccatgcctatttcctgaatggtgttgcctaggttttcttctagggttttcatggtttggggttttacattaagtctttaatccatcttgagttaatttttgtataaggtgtaaggaaggagcccagtttcagttttctgcatatggctagccagcttccccagcaccatttattatatagggaatcctttccacattgcttgtttttgtcaggtttgtcgaagatcagatgcttgtagaagtgtggtgttatttctgaggtctctattctattccattggcctatatgtctgtttgggtaccactaccatgctgttttggttactgtaacctcatagtatagtttgaagtcaggtaggctgatgcctccagctttgttctttttgcttagaattgtctttgctatatgtgctctttcctggtttcatatgaaatttaaagtagttttctaattctgtgaagatgtcaatggtaatttgatgggactagcattgaatctataaattactttcggcagtatggccatttacatgacattgattcttcctatccatgagtatggaatgtttttccatttgtttgtgtcctctcttgtttccttgagtagtggcttgtagttcttgaagaggtctttcatatcctttgtaagctgtattcctaggtattttattctctttatagcaattgcaaatgggagtttattcatgatttggctctctgcttgtctattgttggtgtataggaatgcctgtgatttttgcacattgattttgtatcctgataccttgctgaagttgcttatcagtttaaagagttttggggctgagatgatcgggttttctaaatatagaatcatgtcatttgcagagacaatttgacttccggtcttcctatttgaataccctttatttctttctcttgtctgattgccctggccagaaattccaacactatattgaatagcagtggtgagagagggcatccttgtcttgtgccagtttttaaagggaatgcttccagctttttcccattcagtatgatattggctatggagttttcataaatagctcttattattttgagatatgttccatcaatacctagtttattgatagtttttaacatgaatggatgttgcattttattgaagaccttctctgcatctattgagataatcatgtggtttttgtcattggttctgtttatgtgatggattacatttattgatttgcatatattgaaccagccttgcatcccatcaaaaagtgggcaaaggatatgaacagagacttctcaaaagaagacatttatgcggccaaaaaacatgaaaaaaagctcaacatcagtgatcattaagaaacgcaaatcaaaaccacaatgagataccatctcaagtcagtcagaatggtgattattaaaaagttgagaaacaatagattctggtgaggctatgaagaaatagtagcacttttacactgttggtgggagtgtaaattagttcaacaattttgaagacagtgaggcaattccttaaggacctagaaccagaaataccatttgacctagcaatcccattactgggtatataccgaaacgaatataaatcattctactacaaagacacatgcacacatatgtttattgcagtactatttacaatagcaaagagatggaatcaactcaaatgcccatcaatgttaaattgtataaagaaaatgtggtacatatacaccatggaatactatgcagccattaaaaaagaatgagatcatgtcctttacagggacatggatgaagctggaagccatcatcctcagcaaactaatacaggaagagaaaaccaaacactgcatgttctcactcataagtgggagttgaacaatttgaacacatggacacagggaggggaacaacacacaccggggcctgttggggggtgggaggcaaggggagggagaacgttaggacaactacctaatgcatgcaggtcttaaaacctagataatgggttgataggtggagcaaaccaccatagcacatgtatacctgtgtaaccaacctgcatgttcttcacatgtatcccataacttaaacatatgaaaaaaagctcatcatcactggccattagagaaatgcaattcaaaaccacaatgagataccatctcatgccagttagaatggtgataattaaaaagtcagaaaataacagatgctggagaaaatgtggagaaataggaatgcttttaaactgttggtaggagtgtaaattagttcaaccagtgtggaagacagtgacccagcaatcccattactgggtatatacccaaaagattacatatcattctatggtaaagacacatgcacacatatgtttattgtggcactattcacaatagcaaagactgggaaccaacccaaatgcccatcaatgatagactggataaagaaaatgtggcacatatacaccatggaatactatgcagccataaaaaagaataagttcatgtcctttgcagggacatggatgaagctagaaaccatcattctcagcaaactaaaacaggaacagaaaaccaaacaacgcatgttctcactcatgagtgagaggtgggcaatgagaacacatgggcaatgagaagatcatcacacactggggcctgtcggtggtggggggcaaagggaggaatagcattaggagacatacctaatgtaggtaacaggttgatgggtgcagcaaaccaccatggcacgtgtctacccatgtaacaaacctgcacgttatgccaaaaaaaagaaaaaaagaaaaaaaaatctctgtaccttcagtttaattttcctctaatcctaaaactattttgaaaaaaaattctattttaaaaagcaaagaaagcgaaaaaaaaagttaattgaaaatacctatgagatgaataaagtaattaaataagaccatctgcctagtgttaacattcaatgatattattaatatttgatgataaagaaagaaaagatagaattttaacagtaaaagggactatggatatcacctgttcctaaaatttgaaagtgagcaaaggatttaattttatgagtaattttcagactgtaggaaaaaatgcatgatttttatactactacacttaataatcaagaatcttacatgactttagtacaagcatattacattgctatattcttcgtactgaaaatgtgtttaatatttgttttccatgaagatataacttttctctttatatttttgataacatgagattataccaaactgtcagatttgctcatgcctgtcaaattgaaataatttactaaaaaaactttttattgttcaaatgacaatttccatttttccctagacgctgcgtgctgctggcaaaacctacatgatcttctttgtcgtagtgattttcctgggctccttttatctaataaacttgatcctggctgtggttgccatggcatatgaagaacagaaccaggcaaacattgaagaagctaaacagaaagaattagaatttcaacagatgttagaccgtcttaaaaaagagcaagaagaagctgaggtactgttatttgatttaaaattcttcctagaggtagaaatgcaaacggttacaacagaggctctgcggtatatgcttggccttctccagctagattttctttaatgaatttttgtgtataaactgtatcctcatttctggtgtggaaaaaggaaccaattctgggctgagctagaattgatactttccccataatcatctcactgcatgaaaagtgatctaaggctgttcctcttaaaccttttacctacaatgacttagtgtgtgtgtgtgtatgtctatatatacatacacatatacatataaatgtgtgtgtatatatatatatatatatatatatataaacacatggaactatgtgtttttttaaattattatatcatgaggaaaaatcttttagaataattgattaaataatatagtcagatatataatatatatataatctcaatttatatatatatacaatatatatatgtatatatatacacacatacacacaatggatttccccagagtaccaattgtatacagtggtttcatgaaaattattttaacgttaaaattaacagatactcttctatggggtatgactaaaacagtgcatcatgttttgttaatgtcacaaggatttttaagataaaacatgagatattaagaaaataattttggtgtggctaatttaggttgtcatagattctcgaaagtttcctccttaatcctctttccagagagattcttcagtgtaaatgtttgagaaggcttgtactaagagaaacataatttcaaatgtactgcagttgccttaacatttgtctgaaggtttcacctagttaaatctcttcaaggagtctaatgtattaggggagggcaatcatctgcaatgcagataaattctgatgcacaaatattcagtgcagcattttaataatggtaaaaatcagaaaaaatttaaattttggaaaattagaaaataactaagaaaattatgaaaattgtatatcttaaagtattattttgccatagaactatgtgtttttttaaaattattttatcatgaggaaaaatcttttagaataatgatggattaaataatatagtccgatacaatctcaattttaaaattatacatacatataaaaagaatggaagaaatattagcaccaattatttctgggaggtaagatgactttttttctgtttttcatttatatctttatttcccatgtttttacaagaattttttagtgtttataaacaaaacattttgtaaagggatagtactaggttatcccaggtactacctagggaattcccagaagtttcatttaggccaatagtcattgaccttaccactttcttacaatattatgctttaataattcatttatttttcaaataactcaatctttattaaaccatagagtgcctgattctattgatgatatggagttaattgcctgataatcaaattgtctgtcttattgcatggtttatgcgagttttacattccaaaattaccttgtaaaactttaacatataatatttaatttgtctttactgtaagcaaattaataacatgtaatagtttaattctaaaatacaatagagctttatttcaacctgagacaaaaaccaaatatatactttgtaagcattctgatcattgtgtaaagaaaacgatcatttcatgtttaaaggacatgattatatgcaccatgttgttatgctaataggtgaaagatgtcctgtcctagggtttcctaggatttggaaatgactcatttaagtgttaacgtcttggcccaaccaggcaattgcagcggcagcggctgaatatacaagtattaggagaagcagaattatgggcctctcagagagttcttctgaaacatccaaactgagctctaaaagtgctaaagaaagaagaaacagaagaaagaaaaagaatcaaaagaagctctccagtggagaggaaaagggagatgctgagaaattgtcgaaatcagaatcagaggacagcatcagaagaaaaagtttccaccttggtgtcgaagggcataggcgagcacatgaaaagaggttgtctacccccaatcaggtaccacccaaattgctaaatgtgtatcacccgaggcagaatgctagagaaaaatgtcttattttagggtaagagaactcgggagaggatagtgagtgatttcattggtatgattttaggtaaaaacctagtatcgctaggcatttatggaaagatgtacacaggtttccatttgggttcaatcatttttgaaagaccttatagtttcagaattgtcaatatattctctaataaactaattttcagaagcaaaatgttcctgagaaccattgtagaaataaagagaccattcacactatagaataacttttatatttgtatttagtctgtgttttgtaatgcttcattggttaaaaactaatcttagactagtttctcttctttcttaaacagtataggtaatagtatcactcacccatttggaactttggagaagcctttgatatcctccacccccaaccacatcaactactaatatgtagtgccatagtctgttaattctgtttatgtggaagttctctttccctttctcttttcactgaaaccttcatctctcaggcctccctgcttataattctgcacaaatccccaagatgaaccattgcttctgttttccttaggtcttccctgttttccatcacacaaccccacaaatcacttttctaaactaaaaatctagttaaaaatctacaagattctcctgatatacacagtaaaaaaagatagagtccctgccttcaaaatttcacttgaacctaggtgatgatacagaacttggacacatatatcaataaaaataaatatgacaggagcagtccaagctggttttgaggcaaagaccttaccatactttttccattgttcacaatagttgccactttgttctttacatagtaagcactaatgtctattgaactagatccttccaaaggatttacaccctggacatgagtcatataagcatgaattgaatttttcctcctctttggtattgggcaacttctttttaaatatttaatgactttataaattaactggtgctaaaagctctctttaaatacactttaactgagctcttagtatgtaaggtggattttcaatgcaaagaaccatacagcatgatttccaatttttttgtgaagcctggggattgatatataaaaagttgaatgaccagtagcaatactaagttctttttttaagttataagttctgtgcagcaaaatgaatggcattaaaagaatggagcagtaactctaggccagaatattagagagctgtatagcaacaaataatttacctggtcctgaaaggatgaattctacaaattgtttcatcccttaagtggaagaagttttcttctcactgaattgcttcgtttttaagtatgtttcttttaagtcagtacagagccacctgccctcaggccagtgggttcagtggtatttatatgaagtgtacttctatcagtaggtgcttcagcaaccacgttttttttaatttttctgcagtcaccactcagcattcgtggctccttgttttctgcaaggcgaagcagcagaacaagtctttttagtttcaaaggcagaggaagagatataggatctgagactgaatttgccgatgatgagcacagcatttttggagacaatgagagcagaaggggctcactgtttgtgccccacagaccccaggagcgacgcagcagtaacatcagccaagccagtaggtccccaccaatgctgccggtgaacgggaaaatgcacagtgctgtggactgcaacggtgtggtctccctggttgatggacgctcagccctcatgctccccaatggacagcttctgccagaggtgataatagataaggcaacttctgatgacagcgtaaggacgttttacatagctcaggcatggctgggcccttgttcctgcatcagtcagtctctctgctgaagggccttctctggtcttgtgaatggctctgcattttgcaatactttttctataggaacacacctttgattcattagcctaatcctcattctatgtgttgtaggcatctaactcaaagataaaatcccatttttgtaaaaaggtacttgtctattaattttataattgaagattataaataatctctttagagaacaatttatgacggatacatatatagatagatatcagtacagaaaatgcaaggataatgctgatattagttaataatagatcccatttctatgaagaaatttggattacttgccagctactgctatctttttcaggtcacagcttaatatgtacctattccaaggaatcttatttgagttgttaataacagcaaacacatatttagtatttatgacaaccccatgagatgatacattattatctctgttttacaaatgggaaaattgaggcatggggaaatgaagcaacttgccccaatttactcagctaataaatggtagctcctaagttgaaacggaggctgtctgtttcagatcttgtgctcttaaccactcactctgctatctctccaatgtgcagtaggcttcttatcttgaaaaaatttagaatggctatgtattaggtcctccatataaatgaaacataactgttttcatttttaaaaaatatttcatctggagtctatgaatcaaaacaaaatatctgaaatgcaagcattgacacaaacaaacataaaagcaaaacaatcattttacagcagttccaaaggtctacgagtcactaagtggttagagaaaggtgtctgattaggcttgaaagtgagatctttctcattcctggagtttccaggatatctctttagcccactcactatgctatgctgcattaccaatatcagcaagggctttgactaacccaataagcttcaaacatatgctacatgcttatatatttatatttgcagacaatgtagtatttcaagtgagagtaaagttccatcaaatccatggccacacatatatttcaatttgaataaatgcatgtgcttttaggtaacatgtgacctctatgtgtgcatgatacagcttaagcccttctgcaaggtatttttcattattgaatgagcatgttaaatttctgtggaatcaaactttgcttgcattttgttttgcaattatgtgtgtaatatgtaaaatactatataatttatatcagattaggagattatttcatatttttaatgaagtttcttcatttaagagttttttcaccatagaaaaatcagtatcacaataaatcctaaagtgaaaactacaaaactagaggaattagtggatacttataagatacaatggaaatacagtaaacataaaattgtggcacaatatatggtttatatgaaaacactgcataactaataacgtcatctctatacctgaaacatgtctacatggaaaataatttgtttaatctgacaaattcttgtttgacagactatagcacagaaaacctggttttcgagacttttcaaaaagttgactttttacagagatctctcaaatgggtgtgtctgttcacatacacatagatgcataatacacccatgcacatatctatgcctgtatgtctgtgttttgatacacatacatgcatgactatacctatacaactatacaactttacaaatctagaaatatatatttaaaatatataccacataccacacacaagcagacaaacatgatagatctagagttgtatagttgtttgtgtatatatgtgtgtgtgagtgtgtgtgtgtatttctggcctgcatggaaccaacatagtgttttaaatttgaattagtttccaagttttaaaaataagacattttctcacaaaaataaatacacttgttatgcatgagttcatgtttttgcatggcaacaatttctagagctgaagagaggtcacctctttcagatgtagcttgcattctccatttcactaattgttcctttcaaactgagtcatttatcatcatatgctctgctcagttcatgaggtcttccttggcagtaagagacaaccattacaggagcttcattaatgttgttccctcaataaaaagtaattccagaaatttatcagagaatactgagattctacccctttagatacacagcactacagcactttcactgttttcatgtaggactgtcacatgacaaactatctgaataaattgaacactcagaaaggcagagaggtgatgatagtgatgatataacaaaaaagcagctagctttattttttatctcataaatattaattcctttaatcctcacaagaatatgaagcaagcactatgattatccccattttaccaatataaaactgagacagttaagtagctctcctatgatatacagccagtaagtagcagagccataatttgaacccagcaatctaggctctacttttaattactcactacagctatataagcaagattttatcttatacctacaatttattaggattctgttcttaagacattaattgattttttttttagggcacgaccaatcaaatacacaagaaaaggcgttgtagttcctatctcctttcagaggatatgctgaatgatcccaacctcagacagagagcaatgagtagagcaagcatattaacaaacactgtggaaggtatgtaataatcttcttttactgtacagattcttaaataaaattaacataaatctggtcaaccttaaataggcacatgaaattcttaggaagaattcagagaccataaaatggttttaaatgatggtaaagataaccaatggatactgatggaattgtttttatgtgcttaaaaatggataaaattatttgctattaaacacagacattgataacatggcaaaaatgactttgcaaaatgaaaaaaagaaaacccacaaagacagatgttgggtgatctgacctttcaaagataagtgatttaatagtaattgatgcagaaaacaaggttaacccagagctacgtgattctgtcactatataatcttacaaattacatattcgctcaaaaattgtctcttctaataagcaaagatagtcaaagggtgacaactttacaaactgtgctggcttctaccctctcccctgacaatatgccccaggtcccacctggtccctgggtctaacacttcaccccccacattcccattgtgggggcaaagtgtctactcatctcctaaataaatggtgagaagtaaatgggctaatggtgtgaaatgtctatttcatgagtcctccataaattatttctagttgcttggttctaggattgttttcacctgtgaactattacagcaagagttttttctggacagaatagtctcatcttattgttgtcatgggactaaaaacacaggtgaaaaatatgcatattggtggaaaacatacatttctctgttaaggaaacatagttctcctgtttaccatcacatgttaggtgcatttttctctgaaagatgcccacatatgtgcttgcagtcataaatttcacttccttaccctctcttatgcttcatctaggcaacgaacatgtcataatagacttacataagaggctatgctttcattgaaatagtactgttaaattttcaaaatctaaactataaaccttgtttcaatattagaatgcctgactgatttgtatctggttaggagtgaaacagacaaatggctgactccatgttctctgcttttttctcccagaacttgaagagtccagacaaaaatgtccaccttggtggtacagatttgcacacaaattcttgatctggaattgctctccatattggataaaattcaaaaagtgtatctattttattgtaatggatccttttgtagatcttgcaattaccatttgcatagttttaaacacattatttatggctatggaacaccacccaatgactgaggaattcaaaaatgtacttgctataggaaatttggtaagtctcttattgtgtgttatgtactcatagtttctctttttagttgtcatcattgtcatttcatattttttatgtcagatgaatctgcagcctcagaattatgcatatccagaactttccatatgaatggatgtgtagagtcaagtttctggttatgtcttttaaaataattgtgcagtactgttgaggtctacaaataacaatactatttctataaaaggttaccatcttgggagttgataatgattttttctgccagcatatttcttgggagcaacacttaacatttttggttctttctcacaccttcctaattacattgctgctttcttgtaagtacacacctcacatattttcagaaaacctatggatgtattgctttgacataatagtagtgaagtgtttgggtcctcagagtcccaaagtcctgggtttgaatgctgattctgcattatatgagtgatatgcccttggacaaatattttaactctgtagtatttaattttatcatttataaaataatacttcattataaaataattatttataatataattgtaactgtatttcatttatcatattcttgggaggattaaatgctttctgcttattagcctggcatatagtaaatacacaataaattaaagctatcatcatcatcaacatcattgtcatcaaaacttcaaagacttaatgaaacaagctttaaaaacaactattttgagaaaccaaaatggttgaactggacatagaagactcaaggataggcaagaaggtgatcaacagacttctggaagatataagatccaattagtaaaattgatgccagagtgatctctaaaatgtacagtgctggtcacactaactcagggtaaacaaaatgccagtttttgactatggatgtgaggcaggcaccagttcatttttagggccagagaatctcagcttatgactcttcataaaccatgaataactttgggtatctttgtcaatgtctatataagataattttgcttttgctgtggtcccaaacaaattgacatttgaagaccagaagttcttttctgagtctgtcttttcttctaaattgtctacaaatattcccaatgtttttccccatgtgctcgctgagttagcattcttcttcccttctatttatctttggaaaaaggcaggaatatctagtttctaattgttggtggagatccggatcttgcaaataagtaccttctcactgagacgactgcatccctgtgaactcagaaaggatttacctggtcacagctattaccacaacctcaagtccagctgctccctgccaatcttcttgatcctgcattatttgaaaattgactcctgcagttatagacctaaacatttcccttagaatcttctttggtcagattccttgagtcaaagtgtacccaaaggattcatttcggtgttgcctttttaagtgagtcctttgataccagtatcatgaattaatgatattttgcaatgcacttttgtgtcaaagctttagaagtattactttagctgccacattgtcaattaaatacttttttctcttctgctgataaatctttaaagagtgagtcaacatgttctttattactctaacagtagtcagatcagaaaaaaaaagactggctcaaaatttcagtatcaacttatgttttctttttatcttcttccagaacaactttttgacccacataaattctttgaaaatagtgactgtgtcaattaccaaatgttttactcttctgaaattttaatatgctattctaaaatgctgtctaaaaatgatgagcactgacaggacagttagagcttttcaaccttttgatgctgatatgggagccagggaagagcaatacctaatttacaggactaagttagataagaatatccatttataaagtatttagcaaactgtctggaacacagtaaatgctaagcaaacagtgattattatcattgtgttgatttcctgttttctaatattaacagaaaaacattatttttctcacttaggtctttactggaatctttgcagctgaaatggtattaaaactgattgccatggatccatatgagtatttccaagtaggctggaatatttttgacagccttattgtgactttaagtttagtggagctctttctagcagatgtggaaggattgtcagttctgcgatcattcagactggtaaacataaactaaggttgccattatattctataataaaggggtatttctttggttttgcattatttttaaaaacttttgggaatttgaatcaaaaggcaagattatatcttgatatctagtaaaataaaatccattcattgacaaatgcacttaaagaactaaaaccacatgaatatttttacaatttttgaagacatgctcaattctaatttgaagtacacgctaatataatataaatattttctattaatatagtacaataatttatttcagagtaagaagcttgtggcttacagaatttcaatgattatatgttcataactttatgaatttggtaattaaagatcaaattgttatcccccaaaacaattgttgtctgatcttaacaatataaaaacaaataaagactttttaaagcacattcctctaatatgctagattttatctaagtgtcggcatgagaaaatgtatgaaagtattagaaagtagaattaaggataaattatcaattctaaaagaaaaatatcacaaattatgataagaggtttctatagcaatcctgaactaaaagtacatagtttcttcataatatgtgttgtaattttttgtggcaagtggaacaaaataacagagatattgaaaattgatgaaaatgaaaaataagaatattttagctggataataatgacaatattataggacttaaagtctgctttaccctttgaacaaaaatcaagattggaaacattgaaaagattttcatagtgattaacattaaactttatatttgcttttagctccgagtcttcaagttggcaaaatcctggccaacattgaacatgctgattaagatcattggtaactcagtaggggctctaggtaacctcaccttagtgttggccatcatcgtcttcatttttgctgtggtcggcatgcagctctttggtaagagctacaaagaatgtgtctgcaagatcaatgatgactgtacgctcccacggtggcacatgaacgacttcttccactccttcctgattgtgttccgcgtgctgtgtggagagtggatagagaccatgtgggactgtatggaggtcgctggtcaagctatgtgccttattgtttacatgatggtcatggtcattggaaacctggtggtatgtaaccagatgttcatgcattttaatttctctgtggaaattattttgtgatgatgtgatctattatttttataattttataattaattatatctacaattattaattgcaaaagaatagtgataattttaatacaagaaagaacaggaaagagaacgaaattttgtattagttttcctagccaaataacccatatttatatttttcaaaatcactgcctattcattttaaggcaaaggtttctatctttttctctaattttgaaagtgatggcatatgctctcttgaagctatactagtaaataaaatataattaagttaataataacaaaaatgaagttaataatggaccaaggcaaatgaaaggactggtcccgcaccttatagccatgtgtaagactagcctctatagcaaggatcagcacctatgccccacagaccaaagccagtccaatgcctgttattgtgtggccctgggagctaagaatgatttttacatttttaagtggttaaaataatcaaaagaagaataaatgacacatgcacattatatgaaatgcaaattttagtgttcataaactttattcaaacataggaatgtcaattcatttacgtatcttctatgactgcttttacattacagtggcagaggtgaatagctgccatagaaatcgtatgcccaataaagtctaaaatatttatcatttggccctttacgaaaaagttttccagccactggcctatagcatcgcgtggacatagcaatctgcctactttttgaattagtgttttcttggcttgtactttttttttattttttttcttccttatactgattagtgaaaactttcaagcttacaagcaggagaaaattgggataaaatgctcttctatgagccactcatctcaattctcaaatctgccacgttgacttgtcacagttggtcagcttgacatcaaatctctcatcaggtatccagaaggtgggatatggtaacagccatatggtaagtgccttcacttcccactgagttgaaaaaaattactaaaatattgttgtccttgtaaccaccataaaaagaggattcagaagtcaggacagaaacttacattcatccagtcacacactaaatgatactgtgccagacatacacaaaggcatttatgcagcacaaattctagatttttactgcacaaaaaatatacatcctggattaccattctataattgttgatcaccctcaagttgtagtaataaataagcttcctagttttatatagccttacaaattccttccaatatggaatgaaatgcacattctctttgtttcttcttctctgttttgtatttataagctcctatagcaggatttgcttgtgtattttttttttttttgagatggaatctcgctttgttgcccaggctggagtgcaatgatgtgatctcggctcaccccaacctccacctcccaggttcaagcaattcttctgcctcagcctcctgagtagctgagattacaggtgcatgctaccgtgccagctaatttttgtatttttagtagagacaggttttcgtcatgttggccaggctggtctcgaactcctgacctcaggtgatccagcctccgtcgcctcccaaagtgctagaattacaggcgtgagctactgcgcccagctgtgcatttcttcttacaaaattttgacataaaatcgtgaaattgggaaaggtataacttgtgaaaacatgccacatcaaagccaataatcacaaataatttaaatgtttattatttattcaggcaaattcaaagggaaaggcattcccttggctctcaccacattttccactcaatattttttagtatcttctctgtgaaaagaaaggtatttaggtattgtttagataggaaggcattgtttaggtattatttagggtggaagaccaaaaccaattacccatggtctaatccttgtttttaagatgcttattagggcacagaaaagtggaacacaaaagttatcagacaaggaagaagtgatgagttctaccaataaggttaaataaaatgcttctgacacttaaagaaagagttctagattgagacttaagggaggtttttgaagtgggcctttgaacaatggataatataatatttgatcatggacactggtgtgagagttatgttttcctttgaaaggcaatatagatttatagtaaaaaacagaggggatatattggtgagtgtttcattcgtgtagaattagtgttaactaactcatattattattctttaattattaattcttggcaaagaaagtatacagaagaaaattcataaagttgataaccaactcttgactaatggaggaactaccaatatcatagaattaaaatttaaggaaaaaaatatattcctgatatagccttccacattagagttatatgctaaactggcttctctttttttatatttctctaatttattcttttgatcattttattgccagttaattgaaatggttaaggaccataggtttaggaaaacatttggaaaaataagttttagtcagctcgggtctatatcaggaaacttgcgaagaccattaatcaaaatgagactttgaatcaagtatacattttattaatatttcttctcttgtttaacatgataatacaaagatgatacaaatggactttattttgatttgtgatacccactaggttatagaaatattagagacttatgatttttgaaggaaagaaagttgtcacagcagctgttctcaacgaagtgagaaccgcatgagccactgcaccctgttaaaatggtttaacgcttgaacagattaaggagactaaagcagtaaaatggaccctcagatcttcaccaatattcctattaaaacaaatatacacaaacatgtatttcatagtgaaatatactttttcattgacaactattaaaccatttcagggatttttagcaattatcaaaattgttcactatgattcccagacctccgacctccagaattttctcctaaatcagacttattgagacacacaattttagcctgctgtctttacttacatctcagagaaattgttttaggtatgaccaaaatgagggatgagtaccttctcttcagttaggtcttacttcgatttttaaaacatgaggtagatgatttgggccatgaaaagacttacatcaaatgccaattcaatttccttttttgtttcctggataaaacaatgtttaaatataatttacaatttacatgtttcctgccctctgtgaacattttttttttttacaatgtggagttgacctgcacttctacttcagtgagaaaaaaaaataattaactcagaaataaaactttgcttcaagagaatagaaattgtcctgaccttttttgtaatctcttctagggcaaacataataggcaatgaagccagccaatcataatgccattattgcatgtgaatcaggttcaaggggcaggtccttttctgtgctttaaaagtcacattaagcagtattctagcacgcttcttggacagaatattttattacaggaactttgtaagtattatgtgttccatttgttagaacaagtgacatttatcttctggtaaagtgaacaaagatctttagcacaatagaaaatagtcacaattgttttgttctacctgtttctcacaggtaataaagagtaatgatagatgaatgctaggagagttttttgggttcataaaagagaacttgattaaggcactactgctacagaaatgaacttagaaatgatgtaatgataatggtgagggatcattctctctgctccccatggtaattcttcctgggtatggctgaccctctgctgctgagtctgcaggggctagtctagggatacagtgatgaggagtctaccctcgcctctgtctctctcatgtggtcttatccgtgtgtgaaaaggtgcagaaatcttcgttgctggtttgtattgtggcctatattcggaaaagtgtacttattttattttattttttatatttcctgtctccctatttctctaccccctctccccaccctgatataggtcctaaacctatttctggccttattattgagctcatttagttcagacaatcttacagcaattgaagaagaccctgatgcaaacaacctccagattgcagtgactagaattaaaaagggaataaattatgtgaaacaaaccttacgtgaatttattctaaaagcattttccaaaaagccaaagatttccagggagataagacaagcagaagatctgaatactaagaaggaaaactatatttctaaccatacacttgctgaaatgagcaaaggtcacaatttcctcaaggaaaaagataaaatcagtggttttggaagcagcgtggacaaacacttgatggaagacagtgatggtcaatcatttattcacaatcccagcctcacagtgacagtgccaattgcacctggggaatccgatttggaaaatatgaatgctgaggaacttagcagtgattcggatagtgaatacagcaaagtggtaagaatgcttcatatactttgtgtttcatattaacaattagtatgaaatgaatgaaaatttcatatttctattgtcataagttcttcttaacattgcatgtagtgatggatagtttttgtgcgtgactttacacaacagcttcctgaagattcatctggtaaagttttcttactagttcttaataattgatttaatcttacttagctgtatgagaaagctcaaaggtatctttgagccttcccatgcttcatcccatgtttcctgtcagttgaaaagttacacagtctccctccacagtgcctgtttgaatccacctctccttttcatcacctttcctttgtactcactactttttgcctaaaccatttcaagcagagtctcaactgatgcctctgcttccattttgcatttactctagtttacttatttgattattttcgctcatgcagattcagtcctaatcatttcactctcatgatgtatccatgatccgcaaagtatcgctctctctctctctctcttcttttttttaaaaaacggagacaggtctcactctgttgcccagtctggagtacagtggtgctatcatagcttactgcaaccttgaactcctgggctcaagtgatcctcctgcctccacctcctgagttgctgggactacacacccatgccacaacacccagctaatttttttaaaaaagtttgtagagacaaggtttcactatgtttcccaggctggtctcaaactactggactcaggcaattcttcaaactttttccccagttgctgagattacaggagtgagccaccacgcctggccatccccaaagtctcgaattatgtactgtgcacaaagccttcacactatggccctaaccagctttgaccagctctatctcctagtgctcacccatagatttttacctgtaccaaaccaatttccttttaggtcataaacactctccacactttgcttgggatttccttctccagtcaaaatccttcaaggcatcacccttgtatttatcatctattaaattgttaatacttaaatcgcagttgggtcagggttaaatgaattaacacgttaatacatgtaaaatgtttagaaccatactcaatgttctcaaaatgttatttatttcatccctcctaatttctccccaaatggatgtagtcccttctcatttttgaaccgcaaacaattttatacttcttcctggattcagtaatcttaaattttaattttttgagaaattatggtatgcatcaaatagtactgtaaattcattgagaacaggaactctttaaaacctttttttgtgccctcctctcccacccttacctgcatatttctagtgagtcaaggtatgtattgagttttatttttattgtgaaatataacaaccgtattacaaattacttttatgagattgctttcaagtcttaaggcatcatttaaaaataatcttttgttttctctagctcatgttagaaagtatttgacagatatttaccaaatatcttctatctccttaacttactaagactccaccctccatgaatttatagtggacttggaaaacgagattatatggaataatcatgactgatatatatatatatatatatcagtaaaatgctcaggaggctgaggcatgagaatcacttgagctccagaggcggaggttgcagtaagccaagatcgcaccgctgcactccagcttggactacagagtgagactctgtctcaaaaaaaatcaatacataagattaaattaaatacataagattaaattaaattaaaacaaaataaaataaaatgctctatatttaattgagtgaataaatgattaaataaataaatcatgatatatgtttctatgtagccaaggacattttttccaagacggtaaagtaaggaatcaaatctagtcatccctcgatatctatgggcgagtagtttgaaggccccccacagagactaaaatctgcagatgctcaattcctttatataaaatggcacaatgtttaccataaaacctacacacatcctctcatatgtacactttaaattatcttcagattacttataatgtaaaagtaaatcactgacacaatgtaaatatttgttttactatattttttatttgtactatttttattgttgtatttttatatttattttttccaattattttccatctgtagttggttgactctacagatgtgggacccagggatacagaaggccagctgtattttatttgtatattttaaaatgttctacatggaagaagtaatactcccaaaattttaaaaccgtgttcatttcagcttaaagttagaaaatcagattccacgtatgccttttaaggagcaggcatctaggtttagtatcatatggaaagggaaactaactcagtcacctatttttttctaactaactctgtcacccatttaaagaagattaaaattataaactccaattgcctggcagacagttgctctcagaataaaacttggattctaggtgttaaagcacttcaggagctggggaaagtcaaccaaagacttctgaaattatttcttaacatttatgaggaattatttcttacctgttcatttttctttcatttaaagtcaatggctgacctttcatggatctccttagctgctgacaaaattcttattcttagtatgttgagttgcaacatttttaagggaaccttatagaactttccatttagcacttcattttctaactgaaaaagcagactcattaaaaggaagtgattttattcacagttataaagctagagttatacagttataaatctagagttatagagttatacagttataaaggcagagccatgtcaagagtcctaggcttgtgacttatagctcaatggaatttctacctctcttgtcctctctttgtccatttgaaacacaaaacaaacattcctattggacttaataatttgtctcccctggggtataaagccatgcagctatagaatttatatatctgtggcatgcagatgaaggtgtgttgtcataatggttagctatcttttataactagtgattttatttgtattttataactgaaatagattattttaaccattcataaaattactctgtcacttattccatgagcccttccgaaagcgtatgaaatctagtgccctataaactgagttgtctaaaaatcatttgatgttaatattctaatattcttgattttcactaatttttttctcattacataatggttatatctatatgataaaagagtgtacattcttactctattacatttccatggtatgcacaattaaatatacaggagtttgtggctaccttagaggttgtagtaacagatacacaagctagtatttttaagtcatgtagcatagtgtttgaattagcaagccattttaaaaaaagtgtttgttgtcatcgatttctgcatcattattattacttaagaactcaggttcttagtgctactgacttctaattatgaactttgaaagtttacccttcttcataaaaaattttccatgacgtatctcaaagtatgtcatattaagtatagacaaacctacctgaaaatataagaattgagaaataatgaaggttcaagatctagaggaaatttgtttgataagatattaagctgtggtcaactataaaaaccttacatctaaggtctttctttccagcctcttcagattaaaatgtttccagtttaaattctgtcatttttgttttgttttgttttcccattcagatcactaaaatagtgtacattttatttatttgtctaaaatgtctttaatcctcctatgctaacttttcctgctctaattctcataatcttcatctcccacttgagttcccagagtcttgaactgtgaattccctcttttgcaacttttatttttttcgtatctgagatgcctttgaaatagtgatggttgtgtttgtgatgagcctggatgagccaaagaggcaaattgaattacccaatagaaagtaactcctaatttatatatttatgtcattaagtcttagccactaccttgggatatagttaagaatgccactttttaagatagaatatttgcctcaaatcttagcttttgataagaccttgagcaatttacaaaaacatttttttcagtttatttatgtgtaaaatagattgtaataaagattatatgattctcataaataattagacaaatgcttattgaaaagtgctcaatgtacaattattataagtatggaattgagtgcttatatacacactgtaagtagctattggttacagattgaatttaaaagagatagcgtgatgaagatcagtgcttcagaattttagtgtgtgaaagacatacttggggactttattacaaatgcctgttctggatcatatcctttgaattgtttgcctaaatttggatgcaacttcagaatcattaacaacgtttgcagcagctactgatcaatagagactactatgaacaatcatactccaacaaattggaaaacctaatggaaattgataaattactcaacacatacaacttgccaagactgtatcatgaagaaatggaaaactcaaacagaccaataatgagtaacaagattgaatcagtaataaaatctctcctagcaaagaaaagtccaggaccacatggcttcactgatgaattctaccaaacatttaaagaagaactaatactaattcttcttaaattattccaaaaaaatcaaaaggaaaggaattcttctaaattcattctacaaggccaatattaccccaataccagaacaagacagggacacacacacacgaaaagaaagctgaaggccactatccctgatgaacacagatgcaaaatgccccaacaaaatactagcaactcaaatccaacagcctatcaaaaagattattcaccatgctcaactggaaatcgtcccagggatgcaaagatgtttcaacatttgcagaacaataaactttctatattatatcaacagaatgaaacataaaaaccatataatcatctcaatagacagagaaaaagcattttataaaatccagtatcctttatttgataaaaattatcaacaaattaagtatagaagaaacataccttaatgtaatgaaggccatatgtaacaaacccacagctaacatgatactaaccagggaagagctgaaagctttctctccaagatctggaacaagataaggatgcccactttcactacttttattcaacatagtaatgaagttctagccagagcaatcaggcaagagaaagaaataaaggacatttaaattggaaagaaggaagtcaaattctctttgtttttatatgatctgatcttagatatagagagttctaatgaccccatgaaaaaaagtagtagatttcataaatgaattcagtaatgttggaggacacaaaatcaacatgcaaaaatcaatattatttctatatgttaacaacaaataatctgaaaataagaaagcaatcccatttacaatagctacaaaaaataaaatacctagaaataaatttaaacaaggaggtgaaatatatttacaatgaaaactataaaatattggtgagagaaattgaagaggacacaaaaagggaaagatattccatgttcatggattagaataattattatttttaaaatgtccatattacccaaagcaatctacaggtttaatgcaatccctatcaaaataccagtgacattctttacagaaaaaaaaaaaaaaagtcctaacatttgtatgaaaccacaaaagaccctaaatagcccaagtaacctggaacaaaaagaacaaagctgatggcttcacactaactgacttcaaaacatactataaagctatagtaaccaaacagaatgatactgacataaaacagacacacagagcaatacataagaatagagagcccagaaataaatctacacatatacagtcaactgagttttgacaaggttccaagtacctataatagagaaaggacagcctctttagtaaatggttctgggcaaactgaatagccacatgcaaaagaatgaaattagacctttatctcttactttatacacaagtcaactcaaaatagactacttaaatgtaagactgaaaactacacaactattagagaagaaaaaaaacagggggaaagcttcatgatgttgttctaggcaaggatttttttggataaaacctaaaaagcacaggcaacaaaagcaaatatagacaaattggattatattaaactaaaaagcttctgcacagcaaggcaaacaatcaatagagtgaagagataacctacagaatgggaaaataaatttgtaaactatgcatctgataatgggttaatatctaaaacatacaaggaactcaaacaactcaacaacgacaaaaaaaacaaataattcaaaaatggacaaaagacctgaatagatatttctcaaaagaagacaaagaaatgccaacagataaatgaaaatatgctcaacatcactaatcaccagggaaatgcaaatcaaacctatcttgaggtatctcctcaccctagttaaaatggctaccatcaaaaaatcaaaagatataagtgtttaaaggatatggagaaaagggaatccttacacactgattgtgagaatgtaaattagtaccaccattatggaaagtaatatgggggttctttaaaaaattaaaaatagaattttcatatgatccagcagtcccaatactaagtaaatatccagatgaaatgaaatcagtatgttgaagagatacagtaaacatagaatactgtactcctatatgtttattgctgcactgttcacaatagccaagttatcatattaacctaaatgatcgtaaataaataaatgcataaagaaaatgtacataagaaaaattgaacgccattcagccataagaaataatgaaatcctgttatttgtggcaacatgaatgaacctggaggacattatgttaagtgaaatcagccaggcacagaaagtcaaatatctcacacatatgtggaatctaaagggttgtcatagaagtagatagtagaatagtggttatcggaggatgggaggcttggaggagcgaggtgtggggaaagattggtcaacaggtacaaagctacagtgagatagaaagaataagttctggtgttctattgaatcgttggatgactagagttaaccataatgtgttgtatatttcaaaatagctagaagtttttaaatggtctcctcacaaagaaatggtaaatgttcaaagctatggatctgctagttaccctatttgataattatataatgtatacatgtatcaaactatcacatgtaccccataaatatgtacaattattatgtgtcaataatttttaaaataaatgatgccaacttaatccctagcttacttggattcaggtttctgagatattattttctttattcaggggctatgggtatatttccccttttgcttgtttaagaacctgcattttgagcaaggggaaaaaacatcactgacctttgatatctctccctctcttctccctacccaaaaaccctctcttttatgacctagcatcctggtttctcaacagagtttatggagaattttcagtgctctcctagtataagttttcaggttgacagatttcctcaacctgatagacagttaaaaatacactccagaatcaaatcaaaatattttacagtaaaacctcttatcagaaaataaccaaagagatgagttaaaacaaacggtttagtcaaatatcttaaacagttctgaggaaacaaatggaaatagaacaatagcacttctctgaagagatagtcagtgtcagaatcaagaaagacatgctgttatctcaaaggtacccatgagaataatactcttttcactgtttctaagaatgcaggcactgaactgatggctcttctcagagtcagccttctcctgaagtgcaatgaagccctccaagcacactccaaacattaacaacacactacacaggcttttttaccactggcagtgaagtgcttcctcattagaagccttaaaggaagtatgaaatgcacccatttgtcaataaatatttattacaccttactatgctctaagcactgtgctaagaattgctgagggaaaaaagatcatgttctcacacagctgcaacaatttaatatcgggattaacttgaaagttaaaatataagggctcagggtctagatatataagattgtgagctgatccaaggatgtattagtttcttacggctgttgtaacaaattagcaaaactcagtggcttacaacaacagaaatttattcttttgccagttctggaggctagaagtctgaaatcaaggtctgagcaaggccatgatttctctaaaggctctagtaagtatcctgccttgctgctttctaactttggaggttgttggcaatccttgcagcttgcagctgcatcatcccaatctctggcccggtactcacgtagttttctccctgtgtgtctcggtcttttcttcttataaggaccccagttatattggatttggacccacacaatgacctcatcttcattgtgtctgcaaagaccatatttccaaataagatcacactcaaacatgccagggttaggacttcaacataacttttggaggattacaattcaacccacaacaaagaattttgacttagaagactagatggttattgatacaattaagaatacactgatggaggagaaaattgaggaggtaggggaaatacagagtttaatttggtggcatcataaatttgaactacttgcagtacaggcagtgaacctgaacaggaggtatatggaaagataaatcttaaggaaagaagaaaagtcagagttgtagataggttgggattttgtatgctaactttcattaatcacgggattgtgtaggggtcagttccctgggaaaccaatcctgagagagaaatctgagatttactgagaagtgttttcaggaacgaaacgtaacatctgtaaaaagtgaggcatgcaaaattattgggcagagagagaagttgaactgttaaaattgcaacagagatttcggctgatcctattggcatctctgatgctgtgacaaccctctggagtagttccaaaacaaagcaagagggtcaggcctttcttctccacaccattcattggatgcaggctctccctttacctttccaggggagaagggtataaccttgggggaagcacctcccttctgccacgataaggcccaaagagggattcagatgtgagccttcagcatccaacacttttggcagctgggggaatgagcagcttgctggaaagcaggatgtggacagtgccttagagcatctacttcatgacagaaccacagacagcagctgagaacagcggatcaaacacatttgagaggtggatgcaaaagaagaaagcacgcacacacacacggataaaatgtatacagtagcccctttacacacattatataattttcgtctttgtgacctccttaggaagtaaatataatgcatctatatttgcagatgactgcgattctaaaagattaagaaaagatttggttagtcatggacgtatctgggggtctttttaaatttaaaccccaagctgtaatcattatactacatgccatagaaaggcaagaaaatgagtagtagtataattgttttctgctatacctctgtaatggtgtaattcagggtgaaattttctgttgtaatggtattgtacatttgctgattcattgggattctgatattgtgcttctaatccaccttaatgctgactgattaggttatagtctaccttggtaataatgtgtgatttttatattttaggtgtttaaatttgtttcttcaaaactatcttattcccttctttattgaaaagtaaaactgattttacttctagaatatatttctttctcaagactacataaccctttcctttccatttattcagtattaaatgcatattttatacattatggtatttcatgtgtatctgtatatttatttttgcatatattaatgtgtctattttttcatgcaaattattgataaatatgacaaactcatctagaccaaattcaagttcttgtagcttctgcctgatacattcattcttctctaggtgaaaaccttgctgaggtaactatgaggttcttagtgctactaagacttatccagctctccctggcttgttgatgaaattggcaagtgactcagaaatatcactaaagtccagatcattgcctttaaagcatctcctttgtcatgacttattatgttattacagaaaagtattaaatcaatttggcataattttttctacacatcactttgctctctttgaacctttgtgttctctcaggacaatgtattaagtagaattgatttattattatattatctttcacattaaggctatattaggggctagggagtacacttactgccacaccaaggtacacatgttaagatcttaactatttgaataaacctattttacttaagggtacatgggtaatccctatttttttgtgtgtgtgttttgttatttttggctatttctgagtcaggactctgtttaactgcatgcaacagagacttaactacattggcataactggatagaacattctgttttcatattttaaaacatccacagatcagcagtccacgtggcctccatgtcctaggctccatctcttctcccttctgccaatcttcacatgtgttttttcttctatattaatgcctatgattagaggtgactgttccacctacagctttatatccaatacccaggtagagaaagaaatagaacgaagcagaagtaatgactatcccacttgcctgaggaagggcaaaactttcccagagatccttatccaactttggcttatgtcttattggcaagaacagtgtgacatggccacccctaacaacaaggtagcctggctgaggcaggacatttatctgggcatattgctaccctgaataaaatctggattctcttggtaagataccttggaaggtattaacaaggtcaggcatgcttctccaatattactactgctactaattattattattcctttatgaaaatgtcaaaagaattgaaggatggtaattttctattttaagagatgcagttactaggcataatttggaataatatgcatcaattgtaatgttatactttgaaacatattgtataaaattaccaaaaaacaaaagttaatttttacttattgaattagaaaatatatatgaaaataagaatattttaagttaaataataaaaaactaaatatccaaccatttttaatctgcaaaaactagaaatttcatgtggctcaacataatacaaaggcataagtaaaatataaacttcattctacctgtataatcttatttcttaattacataaatattatgttactgaacacagatattttattcatttcttttatttgtgcatagtagagaacacattaaaattttctatgactctctgcccagaattataataggcatagagtttttctctcctaaattacactcatgaaatatttttggccccctataaatattgagtcccccaaaaaccacactaaaaacttcatgtacttcaaaggtaaagggtgattgatcattgacaacaaaaagtatacactctaatagcttgcaccttaggtaaatatacaaaaaattataacacagaacaaagcaaagcacaatccgtaacaggacactaaactagtccattgaggatgcattgagtaaggggctgtatctggctgacttcacatgaaaggaggtggcacttagaccagaccttacagtatggagaaaatttcactgggcagatgtggtacagaaggaaatctcaggcagaggaacaagcattcatattgttcacctgattcactcattcattcatctatccacccattcatctattcagtgttcagtttacaaagtcattatctttggagatacttaaatatgcttattattatgaaatgtagtcattttgttgacctgataaaaagttgtttcaatatttgcagttcccaaattaaatatttaatgtccttttactatgtggtggttttaattacactgttatcaagactttctctctttagatttttaatcaaagttttagatttaccttctgcttattactacactttagaaaatataataatcttttaaaaatgcatttgactttgaaagatttagggattagttacagttatgctgtttcgtaaaattggcatttgattctatattttatgcatagattttttttaaaagcactcttctgtagaattgcacttagaccatttgtttttttcaggttgtttccaaagaatttgaaaaatctttccatcttcattggatttgtttacgtgcctaaaaacaatgaaatatttgtctgacatattcaaatcaatgtgtcttattctttatattttgataaatttggaaacttcacttttttgcaatgctgtttaaaatgtcaaaattaattaaataaaaataagtcaatcaagaaatgctaattttagaatatgctttttaaagctgcatactcttactgccacctcaccccctatactgagaatcacttatatttaaatgttgcttgcatttaaggaaaaatagaatgcaaaacattgcattagcacattatagtatttaaattcaatttttaaatagtagagtagaattatgtaactgtttaattgattgtttttaagtctctgttgaatgacatttaatcttagtactgtgattcaaatatattgcttaacgttgagtatatagcatgtactttcaaatatgtaactaatttctacttacaggtatatgactttaaacattttaaaacacagttgactaaactctttcatcatgctgcatttctaaaattcagtacctaaccttcttctcacaggggtaatatcaaactggatcagtcaaggatgcagctctgtgcttttaaccaggcagagacatatgtcaccacttttacacaggttacctaaaaaaatcatacatacgatattttttcaatgtcttgcatgctgttcagctacaaaacctttctgcctgacccactgcaagaaagtagaaacatatacagttgttcaatagataaagtgacatcacagcatgtcaccagggcaatttgattatttttttgtgattctcttgatgacttcttgatgtaaccttcatgtgcttaagtgatttcaagtgcatgatctgtagatttttattgaattgattataaaagtaaaatgcagaatgtaacagtagccattgaagctacatttaatttgaaaacctctatcaacttcccttcctgatttaatctacataaaaatatggagagatgtatatcacattaaattgtcacatttaaattaagtagatcaaaactctaaaaaattgtggaagaagtgtttctggcataaatataaaatctcagagcaggaaaagatcattgtaattctagctttgtatttaataattctggttatgtatttatggataagcaaattgagactcatgctttcttagtacacatctagaaagttggggtcaaagccaaagtaccctgcttctagtataaactttgaatacattttgaaatggttttatgcactgttagttatgggactttatttttttaaatcaactcagtaattaacatttgattttatttgctcctatataaaatgcatcagttaaaagttgataggccttgcctatgaatgaataagtgataagtgttcaaaatgtttaattttattccagaagtaatattactcattgataagaataagtttctgattatatacataatcagatcagtctctagaaactaagaggtttagatagagcatattataaatcctatctatcaataacacatagaacacttttactgaaattagatacagattaatatgtattgccttattgaatatttctaaaatgtattaaaatacatactaagatatattttaattttagcatactttgttgaatgactgaactttaatagttctaggatgggggcaggaatctctgccaataagaatcttgactcctttttataatctagttcatattttgaatttctctgtcattgttgagatgtttgtattattgttatctattgtgcaatgatgaaagcaaaactttatcctgaaattgacacaccttagagataatattgctaacagtttcaaatgaaaaattagttattttagtgttccagtttatttgaagataattttaaaggtggcctaagtaaaagatatatttttctatttcaaatttggtggggatttagaggcaatattctcatagaaaactattttattccagaatatggtgaattttcttcaactagagcctaaataaggatgcatatacacccaatattatctatataggtatagataaaacatataatttttgagaaagctatttctagaaatatatatacatgcatagacatataaacatatgcatatatatgttttgaattcataaattcttattacttttttaccaagctgttagaaaagatgaggtacatgttaatgaatggtcatcctcttaagaaaaaaactgaatattcagttaagaatgacttgaaatatggcactttagcaaaagctgcctacataaaggatatagttattttatccatgtaaaatttctatttatattttcaatattagaaatccacatgtttaaaaagctagtaattattccattcattaaaattcacttttccttgccctccttcattgtgggtagtattagtagttaacagaaatgattcagatatctaggtagcttactttgtgtttgtcattcttgtttgtttcaaaattatagataatatttacgaagcttgagtctgcgtatctacactttgcctttatgtttgctaaggttccaatccttctttacctacttgttgcatttttttaagctggcataaatagcaaaattgtttaaatgtttgcttctaaagactttaagacactctgacttgacccactgtattccagctgctttctctgcaaacagtgtagcagttctgtgacagagcacagagagagcccttgaatatcaatggccactttacactcctagctctttgcttctcttcttttcattagaaagatgcttcaagatgatactataggacctggctgagaaatctgtagccagtctagccttcttacatggccaactgttgttgcttttatatgatttctttatattcatatcttatcatttagtcacgtaagttttcatgttattggatagaaagtgccctaggtagaagattctgagaaaaagaagaggtctccgtgaaatcactggttttattctgaatttctctggtggtggctgagatttgacctcattatttcaccaacagaatactatatatcatgttgaccttgtgatggaactgtgtgtttcacgctgaataagtagctattcctcccagagcctacacaatatttctctgctagcaatagacaaagaaaaataggaaaggaaaaaaaattggttttcttgccctttttttaaaaaaagagctaaagttttagttgcccataattagaatgtgagcccagaatttattgcaactagttaataaactgacaattttctgctaaattagtggaagtaacattaaaacttagacaacagaagaaaatacagttgagttttccactgatcaataatatctggagtattttttaattatttccatttttttcctgaaattcctgagcttcagtgattttttaacttgaggcattaccttttaaaaagaatcttgagaaatttcatatcaaaaaaaaaagattgtagagacctcaaggggcccagaaatctaaatcatgttaagaaatgtgattacactcaagatgaaaagcactaatagtaatatcaataatattaatgacctccaattttaaaaactctataagaggataatgttcacatttctccagaaggaaaaaaataaaggccctgaatgattgcaagagagaagaaaggttatttttgttctacaccagaagagagtatttaaacatctagttgtcctgtaacataatgggaaacttggaaaatattggactcttatgccacatagtaactatgtgtggatttcttctcaaaggatcctttgatcctttaattgaaatttactattttactccttaatgattcaagaacacaattatagatattgaccgtaaaactacacaattaaattaaaagatggataatagtaacttgaaactaattttaaaatgtctttcttgcttattaacagataatggagcttagtttaccactgtctgccataatttttcttctcttttatacccatctcctccttttgatttgcttctctcaactttcttactgtcttttgtgagtattttaaggctcaggtgaaataaccattctaggctctgctccttaaagaatatctttttttttgttgtgtgaagcaaacagtttatagtatgtacttgaaatgtaacatttttcagttcttttcagcatcaatcattctctttgagtaaggtttttgttgagttctgtgttttgtacagtgctgctgtgtttgatagtttcttcttttgagcgttagattatcaagtcattagacactcctacctcacacctcttggaacaataaataactagcattaaccatcatccatgatagcatgaaataggcttacatcgttaatgtttatcttaggaaatgccagtgataaatttgtaagtgaacaacttaggacatgttctaatatgatacatatatttaacacaatttctactcaagcagtatagtagaaaacacagcttcaaggcaatcaaagggaaaaccatgaagaataataaagcttttaatttggacatattttcagtaattgaaaaggagcatcttaaatagctacataagtttacaatcaagataaggattgtttcacagctatagtgttgtatggatgcacactgaaaaatatggaaagatatgtctctctctctctctctctctctctcctctctctctttttctctctctcgattacctcaagggggttgaatcaaggagatagtggagggaacttttattttgcactgtaaatactattatacatttaaaatgtttgagtcaactatatcactttcatatttttaaaacacttttagaaggcacagtcaatatcatattattcaataaaaaggcaggaatgctaattatggtacacttctgattcctaatactagtgagtccaccttcttgatcctatgcttatatttatatttactttatttataactagactgccaatgatgaaaaaaattgatacttcccttttattagaaatcaaatccatgtgaaaattacagaaggtcctatttataatagcaaaagaaatttctttcatactaaagcatttatttcacttctctaatatagtcattctttcatttccaaaattacatggaaaactaaacaacagatgattgagtttaaagaaatgaagataatatagaaattaatcatataaaataatacaaataattgatatgatcttccttgtatagtaaaaaacatatattcaaagtacttaaatatggtgatgcctactgtgagaattcaatatatttcaccgcaggaaaaaaaaactttattatatatatcagcctttctatataaaggtattctcttagaaatctgctaaagaagcttatactgtagcaagtatagatttcaaaggctgaattgactagaactgtctatattgctaaagcatgcttataaacatttaattttatatacagtatggaaatagttactgtttgaatacttaatgcattcccaagaaaacattgaatgtctaagaatctattagccataataatttgtctgtaaatacaaattaattaataatagttcatgttaaatattttgataatttctgtcccattgaacaataatattgaataactttatgatgtaaaattctgtgccaagctgaattcaattgaccattaaaaaaacataaaacctgcatatgaaaaaaagtttcaacaacaagatacactatataaaatcacgtgaatttttacttgctcataatctaatttggcataaatctttgttaatgctctcttaaacagtgagaaaaccaattattgatgtttgaagatgctttcatgaatttagctaaagtcagaattctgcaaataagaatcattttatttaaaagttgttaccagctcagagaaaaaccattataactatttcctattgttaatattgtgtctaatagcaggggggtgctttgtattctttctatcagcaattcctctcactgctttacctcaaaacccaggccaataattcttttttcagaaatgaagggcctggtcttaacttcacagaataatagggccttgtctttcacttctctggtgatagttcacgtgcagccgagaggtcaggaattgaagccattaaaactgtagtcttctaaatatggtactttggattttgtggcaattggcacaaaatacatattagtaattataagtttatccaacatcgtttcctggattaatctgtattttaaaacttatatattttaaaactcattctatagtttatactttaaagcctattctatagttttatagaatattcagttataattaatttctattatcttattttaaattaaactaatttagatgaattcaatcagtttaaataacatgtttttgagtgaaattttgtactgatactttcataactgaaactgttatcaaactcctggacctggtgggaataatgcctctaggccaacatagattggaggagttctcttaataggttgttcataattatttactccagttataagaaagacattgtctgcttacatcattccttatgtacaatactttatccatgccatttttatgatgttgtatactaggtgataataatagcattgagaatttaatgtggtacccatcaagaatacttctagcttccaagtcaatctctaaaagtcaaacctttagattgggctatcatattaatacaaattcatagattgagaatcaatttatctgaaataagtattttattatttttagcacttgcacttgcttgaactactctaaaaaagataaagttgtaacttaataagagaattgtgttgtagtaactagtagctttcaatattcacatgtcatttagcaaatgagaatgaaaaattaactcttccattgatatgctgctttactcctttataaaacaatatttgggaaatttgacagagttttgctacagttgctgtatgtattttttgtaaagatttcttcgtgtgtgtgtgtgtatgtgtaaacatcatggttactcataaagctctgggtgagaaaaacctatttgcgttatgatcacttatatgatcataatgacaatgaattcattattccatgtgtaagtctgccatgtttaattttcttcgatctttgtttcagagtttgcatgtggtgcttactttagtagccactttcttgacattataaataatactgtttgatcttttctactatatactaaaatgttatatacaaaatgggtggtgttggtatggtcattggcattttgatttcaaaaccgtatttgattttgtggtcttgatcaaagaacttctatctatatcatcctgctacatatatttaaattcaagagataataaaaaatacatttggactttatcttgcacttatctttttaaaaaattttaactatcaataagttttttgccaactatttgatctgagctttcaatgatcaggcattagtaatttgacacttgtattatattgcaaatagggtataggttgtcctcaaataatgattgtcagtgtccataaatttatattaaaaatttaaaaaataagatgtggtcaatactttccaaaagtgatagttaacatcaatatattaccttatctaattttggccacgtacttgttagtataataaacataataaagtttattattttacaggatggtgtagatagaaagatcaagtatagatacatttaaggttacttgacctcaatatgtgtttatacattttttatggccatcatactattaatcttttttcataatactttgcatgagtctgattattaaataaggcttaaatatcatatttgaatgaactctaaatgaactacctggtggggtggtgaattcctttctagagattaaaccggtcaagctcctcagagtgcagcacagttgataaccctttgcctggagaaggagaagaagcagaggctgaacctatgaattccgatgagccagaggcctgtttcacagatggtaagacaaaaattgagaccttggttagcattccttaattagtgttctggggtttgtcttaacgcctaatacttaccagaggttgtcggtaagtcagaagactccattccatgctgattcagctatagctgtatgatgattaagggcaagtcactagagctctctaagcttgagtttccacatctatggcacttgactaacagtaatttcctatcactgtatgttagactgtaagcatgctactacttcttattttagagccttaattcgtattcccagatcaatggaaccaccagaatacaagttaatgaaagagtctgtactctggtccttttaatcaaaaatggaatctactcactaactctcagaaaactgtttgatactgttgactacagtctctctcaaaattcttcctttccttagtttcagaggccatagtctacctttggtcttttatttgtcttagagttctgagttcctctctctatttctttaatgagtattttttctgcacatcctgtaaataatgatttctccccacatgttcaatcttcagttatcttttcttattctgaagctctgaggtgtttcatgcatgcctgtggcttgaaaagccatttctgtgctattgactcttaacatcaatgtctttacctctaacctcactcttgagtcccagatctgcttacaattccccattggtcatcaccatctgttgtttgtaaaacattccaagtttaataagtttttttttttttgaaaagcaaaaacaaaaacaaaactttagtatggtttacagcttcctccagtctttattagtaacttcatgatctaccttaccctcaagctaaagactttgagagacccttaaagttttccttgctagtcacaagttcatcaggaactctggagatagggcccaagcccttaagaggatttgcatgcacactaaaatgtgagaatccttggcctctagggtaaagtctgaagtccttaacttgacatgtaaagttctttacatttggccttagtctcttgttttgtaacagtacctccttctactcctgtatgctttctgatatgctgaatttcttactacttctggaatttgtcagggataatgcagtattgtctgaacaagtattgtatcatctaggtaaaaatacaagcccagagtagggctgcaatgtaatacagtaatacaaagttcaaactttggagcctgataaacatatgttctaatttgccgacttatctgcctgtgagaacttgtgcacaatttaaaatcttgttcttcagatatctcatctgtaaaatggggatatcagcatccacatcacagcgatgctaagaggatcaaataagataatgattataaacttactagcacagtgcctatcttccttcttctacttttcttattcttcaaggattctgttaacaatcttatacagaagttatgatagcacagatgctaatgacttatctagtcatgggcttaccctcagcattagtattttttgaaaaatcatcgacttgctttcagtgtccaagattttctcaactggtttcttataacattcatgggttaagcaaaatgattggaaaataaagacatcagcaaactacaaagagtgcatggattttctttaaatacacaccaaatatcattttatgtaagaagcaaaggtgtacgacatccagtcaatataaattttgtgcttgctgaaattagtgctataagcaaatgcacagtttcctttaaaagtgtccatgttacagagatttaagaatttcatcaacatgtatggcctgctcctcaagaaatttattagcagtatatagacttaaatttgtattgatgctaccaagattttccctattcattttatgaatgatcatgacttaaaattctaggataactagaaagaagttgggcttatcaatcaacttaaagtttcaaaccaaaaaatgacttcaaaaaacttaaactcttacagaaagtattaatactatgctatttcagactgtaggtgctgttataataagatataatacaaagtttttttaatcctataaacatcaatgaaaatacttttgtgaatactctgagattattcattgcttccaaactgaggccagtatagaagaaatattatggaaacacattttccaatgaacctgggcttggaccattgaaatttactgagggagcatatatctctgagtcacatcccttttatgtgctccagcagagacttcatacagtctctggatctgtagcctaataaattcagtgaagcagccaatttgcttagcctttcaaccgtgtattcacataatcattctttattccagtaaacaaataattattaaatacctgtgtgccaggtccagttccaggcactggagggagatggagctgtgaacaaaacaataccccttgctgaagaaacatatcaagatgtagcaggtcagataagtgaaaagtgctatggagaaggtatatggaaaagaggaataccaagagtgagggggaagaacttactagcacataaatatgctatcaatgaatgattggtcagagaaagcctgcctataaaggtggcgtttcttccgtgatgtaaagaaaattgaagggggccgtgcaaatatatggagggaaagtattttaggcagagtaatgaaggcacatgccccaaggtgaggatatgcataacatttgggaaaaaccaagaggccaaaatagatggagaataatgaaagatgggaagaggattaaaagttaaggtcagaggctgggtgaagtggctcacacctataattccagtactttgggaggccgaggtgggcgatcacttgaggccaggagttcaagaccagcctggccaacgtagcgaaaccccatttttactgaaaatgaaaaaaaaattaattgatcttggtgatacatgcctataatcccagctacttgtgaggctgaggcacgagaattacttgaatccaggaggcagaggttgcagtgagccaagattgtgccactgcactccagcctggacgacagaggaagactctgtctccaacaaacaaacaaataaaacaaatgacattatttttaaaaagtgtagatcagagatgtagtagaggccagattataagacatttgaagaacattataaggatgtgattttaaaatctcacaatgtgcaatcttaagagtggaagggcgaatagcaatggcagaagctggaagatttcttggagtttctgcataaatccaggtgagaggtgatgggagcttagactagtatggtagagttttgtatagtgagggtgtgacatgctgagtatattttgaagttagagctgaagggatttgttgatggattgaacattgggtgcttaaaaactggaaatgcatagtttccacatgaagactgagaagcatgggcttgtcagaatgaagaatcatgaacatgtttacttacaagttggtaattggtctacaagagctgggctagaatcaatgccagttcagagcaatgtttcacctccagagatctctgctacctgaaaggtaacagaaaaaattaaatgaagtatgaaaaagaattaaatccaagtagcatgtttttactgaagataaatgttaaaacgattttgttgttcatagtctcacatttgttgattcatttcagcttcataattatcactttactaatgtatttcattgattgcatctggttcctcttattcaccttttctctccctcttatgcaaggttgttccttagctctgtgtctattactttgtatttgaagacttcagactgcttccgtatatcttgccctgttctttactatccttagttctacatgacttggcaacctatataattatgaacatgacatgactctttgggtctatgtggttttatattgtgctgcttttagattatcaaattagtaaattacataatcaggattagagttagcgaaaaataacctttttcacaaggtcaagagatcgagaccatcctggctaacatggtgaaatcccgtttctactaaaaatacaaaaattagctgagcctggtggtgagcgcctgtagtcccagctactcaagaggctgaggcaggagaatcgcttgaacccaggaggcagaggttgcagtgagctgagatcctgctactgcactccagcctggcaacaaagtgagactctgtctcaaaaaataataatggtaataatagtaatgtatttttctgttaacttggtaggagaagccaaatcatcttcctttcaaaatgttttgtattcacccccttcctataaaataactaataattaattctaactttagtaacacaataaccaactcctttgtgacttttattttttctttcttttggaaagataatgttaacaaatatttgttttagttatatttgatgttaagaaatggtgaaaaaagcttgttttcataatcaatttttaaattaattatattgatcatgctgttatggtttttaatgaatagtctgtcttttgaagtggtcagtggtttcttttttctttcctttccttttttttttttttttttttttgagagctttggtttaacatgatgaaactcagcatagactttatgtaatgcaccatgagagcacattagtgaaaccacccaaaagaaatagcatttactcactgggacccattaaaatgtttgagagattctctgttatgtttacattcaattaatagtccttttaaagagaaggtatgataacattgctaaccagcttagttggaaatctcttgggatatacctttgcacaaaaaccagacaggcgctccatcactcttgcctcaaaataagagaaagaaactctctgaggtgtaataaaccctgagggcaatatttatgaaacttcatttcagattgaaagtttactaacttttctaattaggatttttagtgtttttatttcctcaatcataagaataatgtttcccttcaattttaagattgacaaaagtaaatcccagagagcaaaatcttcttaaccaaagggataattttcttatccaataatttgcccctgagaaagataaattctttcttatatgtgatcattgtttttaagtttaagacaaattctaaagcactaagttaatattaaaaaattcatctcatttttttcgctctctctggtatttttattttccctgaaaaagattaacttagagttaatttttgaccctacccttttactctgtttttatatcattttatcgaatgttctctcttaactaaatgcatgtagataataattatttaagtataggatgatacataatttcagatctgagatcatgttcactgtaattaacattgtataaatgaagctatgtgtagattttccattcacctttttttttctttttcatccaatgtttatgtaaagtatagaattcacagagatgtaacctttcaaattatgactaactgcttagaagattatataactctttttggggaatcaagtcttttaaaaatcaactataaatgacctattaagccaagtagaggactatgatgagtactataagcacaaagagcaagcattacagactcagtttgagtcttctgggaacttagaaacttccagagagaaaaaacaggaacacataaaatatacatgataacaaaaacaccagagacatagggggagagggaaacaccttgtttgctgtatttctatagagctggaaattaaagtgctagaaaataaccttatatcaactggatcaatgcactaattagacttcagaaacatgaaaagattcattacaaaacattttctaccaggtgcatcttgtcaagaggattctagttttgttgttttagaacatacaacttatgattatctgaagttgttacttgaaaactcaatacttgttaatgaattatattgttttacagaaaaggagatcaatcttttagaaatatctaaaattcaaacttctgaaacaggtatcaaaaaagtgctgcccattcttactttcccacctcctgccttcatctaaaatgaggtttttcatctaaaattttatgaggaagaattcactgtagttactttttaaagagtctctcttttcttcagagtaattctagttgctttaataaactttaaattgattaaaatttttcaatgtttcaatcattctctttctgggcctcttatgttcatagctctgtttatcacttcttataaaactttttactctttggtttctcttttactgcaccctcttggtccttcttgttcatctctcatttcatctacttcaaagttttctcctctacctgtcctagtgatgtgtaggtaaatatttttataaactggttctccaaggaaaataaaaaatgtgtacttatatcatttactataaattttactgatattaggatatatgacacacaatttacaaataataaaatattacaactttttattgaacattctgtatatcaaattgtttctcaaagaatgctttttttgaactttgccaaacttttgcatgtataggcaacctatttttgcagctaataaacaagtatagttttagcatgaagactgcttgatatttatgttagtcagtgaaataaaaaagaaatgaagaagctatatgtcagaactttactcattcatcagtgatgtaagcaattatttgcaaatcaaaaaacagaatttcaataatgaaaggatattttttaatttttgtgctattcagagtaatggctacaaacacaatacaccttgactgtttatctgttttattggcatttcctccatcaccttcttaattctactctagaaaatcaagaagctctcatttgtagtgcttggagatttttgtaatgtaaagattcccaccatcactgatttcaaactactgatgtgaaattgctaaatgcagagttaagaagagattcacagtagctcaacagtgtgacatacttccaccatccagatagaataggccagatagaatagaccagcatccagaaagaagagttgcacagtagcccaatagtatagcatattactactgtccagagagaataatccagagagaatagaccaccgtccagaaagaagagatgcacaatagcccgacagtatgccatacttctgctattcaaacggaatagacaaataaaatacagtaaaataattaggaagtgatatgtcttagtatttattacctttccttaaggtaagttatagaattctaagtttatatagtcaaatatttaataatggctgcttttaacaacagacaagcaggaatttctgacagtttaacaacaagaattggtatggtctgctttcagcacaccattgaattctctcccttaatattgttgtttcagaatgtttcggagttggccctttttctgctcaccctaaatactctttttgtgtgacctcaaaaactgttctgacttcagcagatacatgtatgctaattattactaagaattcttttctagacaggtttttcccgtttcaggttcccacccccatttttaaaatctataggatatctgtatttaaacaattcacaggcatctcaaaatcattacctgccgagtcagctcctcctcctgtggttttcaattcactgctaacatccacctggtagtcctgggatccttcctttctcttacatttgatatccaatcaatcaccaaatcctgctgattttatctgccaaatatgtcttgaatctgttacaactctagttcctaactaatctttccctccagacaggatactggaccagaatccaaatggttttctgggtatgaaactttcttcacccctactcctctctattcacccttccaacttatcctccatgtaccgtggagacatctatttacattgcaatttgcgtatctcgttccctgcttataaccctttacttactcctcaacctcaataggatataagccaaactccttaaggtaaaggccaatgctttccataatctgaccaatttttctaagctcacctctcacccttgcctcttgtgtacattctgcttgcatcacaattctaaactggtttaaatttctatgcataacaatttttgctgcctggaattccacccaaactcttttttactgatattttgattcaacccaggctccatctcttctaggaagcctctactgatctctctttctcaagaaataagccaggtgagattgatttcttccatgctatcaaaatgaaccctgactatctgtcactttagttgccatatctagttatagtcatttatttctgtttttatctacctaaccaaaacctaacataaattcactgaggaaaggaaatcatgtacagaggtgaatacataaaagatacgtaacaagggtttgatggacaaaagaatgcgttaatgaatgaataaacctaaccatttttaagtacaattttcaattttttgtagcagtatattttgtacataaaaatttaaagtcacatttgtttttaacttagaatacttgaaacagtttcatctggatcttctaatcaagatgagtttcttttgaacttaatttcaggagtttccactaattttctcaatattgtttagaaaggtgtatttcagagggtttttaccatagaggagtggaagtatctaaaattatagactagaaaaatttatctgtcagaaaagaagaccctaaaattcatgtcgtcttcagattttagttcattcattcattcacacataaaatgaaagtggtttaaagactgtggaggagactgaagagaaattggggattacagaagacaagaatacattgtaagctaaaactaactaacaactatttagaaaacatcatgcaaagttagaagatgaaggaaggcagcatccaaattaaatctatctgaaattgcaagtataggtgttgaaattatttggttgagggagtatcacagaaagcagtttgcattaaataatgtattaaaaattttatttattctgaatatcaagatttaacatgcatgtctttcttgtcaggttgtgtatggaggttctcatgctgccaagttaacatagagtcagggaaaggaaaaatctggtggaacatcaggaaaacctgctacaagattgttgaacacagttggtttgaaagcttcattgtcctcatgatcctgctcagcagtggtgccctggtaaatgatctgacacctaagtcaatatattgattaagtcaatattctttaaaatgagctaaaagataaaaatatcatggcaagttgttttacctagaattaatccctatgattagtgccaatgacaaaattttacttgagctcagtaaatagttactgagcactcctacatgccaggcattatccttgctgccctgaatgctgttgtccaaaggaccacccagatggctataatagaaaagagaattttactggcaatatcagtttgcaaaacagggagagagtctgtggcataaactgaaagcactttccctgtagaacaaagagagaaggttagaggttttattaaaatgggaaaatgttatatattgctctttgagaaagttcattggccctagtaaggatctggggaactggtaagctccaactggcgagcaacagtcgttggcacaattagtcctagagtgtaacaggtttcctcagaagctatagataaaactaatttcaagttacaacaagcagcttcaacagtcagtcttgcagagaattataattcttggagtaatgttttgtaccctgagagcttttccccctgccttcttgactcttagttgactgttagttgagtaggacaagaactacccaatttgtatgatcaactttcacaatgcaaagataaataagatccaggtactgtttattcttaaggagctcagagcaatggagaagagaagaatacaaatgagtaactgtagagcttggatgtgtttgtaagcaaagtgtaaatgtgacaaagttctgtagcaaggagaacaactgcttgcaatttcagaaacgtaaatggtgcttttcagggtctagaaagacgaacaggaattttctagttaggcaaggcaggctgaggggaacaagtatacaatcgtaaggaggcataaaacagcatcagatattcaggaaattaaaaactgctgaactgcaagtgtggtgggaagaagaacaagtacaggtggccagagatactatgagaaagcaaggtcagcttgtgaagcatcttgtgtgttataaaaagggaaaacagatggtagttttaggataaaagtaggacaagtttctcattcttgtacacatacaagcagcttccatgagagttgaaagagatctagtagaattacaagctacctgaacctttttcttaattgtcatttttcctgctgacgctgacagagatgagccattagaagccattaggagcccagatctagctagatataccactggaagtttcattatactaaaaatagaatactcaagaactttgtaacttgcctcatagacagtcttcatgagtttggactttgattttactgtacttatatgctaataggttgatctgatactgtttcatggatgctggcagaagatatgaggtgcttgggtcagagataaaggactttgttacttatgtgtggaaagtagcatgagtttcaacatgtttctgttggttccccctttacccaggtctcatgggggcattatatgagcctgaatgagtgtgtacacatatagtggattgatgtcacagctgaggaacactgagcttagggaatgcatccttttataccaagcaacataagcaaccctgctctttgtcccagagaccctacctcatgtctcaaggttgctcactgcaaacacaaccctgaggaatgtcctaggtaaggagcaggcagagcctggcattcttggcacactccccaacaacctgcagggacccactgtggctttcctttcctatcaagtctcaactctcagaaacagaaaatgtgatcagaaaagctctattttccttacctggagtcatccaagtagaaatcatgatagtgtctaccatgcaatgtattcctagtaactaaggaggtttatcccatgctgactcacatatgtgactgagaatttcagagaggagattacaaaaaaattaaagtttggagtaattccttgttcaaaatgtctaaaacagaggaagacatttggggagggcattctcaaaagtgtattttaaataaatcatatgaggaagaaaagggaaagatatttcaagaagctggtgtttgtacttagacaggttgccaattaaactagattttttaaaagtatagcaaacccccatgacacgtgtttacctatgtaacaaaccttcacatgtaccctcaaacctaaaataaaagttaaaaagaagtaatagctctcatttagcttatacttattgtgtttcagaatcttcttttagattttctcatttaattttcaaacaaccctgtgagattatgatattttgcttattttaccaatgatgaagctgggtacagttttaaaagttgcttaatgtcccaaagctagtaaatgacagagctatcactgaattgacatctaaaatcaaagtcaccatatcttttcactgtgttgtggctcctcagaaagaagagtatacacaaaacagaaataaatgagtggtaactgaatttagtaacagtaaagcgttaagtcctaaatcagatagagctcacataaggtcattcttgcctccttgctcctacatccacaaaattggttctggaagctagaacccctgtgggctgaattctaattcctgctctgggaccagtcagagagaggttctcatcatcaagacttcctgcggctctgctctgaccctgtacaccagttctagaaacaggcttcgttttccttgtgactaagccccttccttgtctttgtatttcaaggactgagtcattgccatagtttcggtttagatggcttgcctgattcctccagaatttgggggtggagtggaggggaggaaaatcctgagggctagaagcctccctctgcacttcaattccattgaatttcagaacctctgccaactgctgggaccttctttttgcatcttagtaggtccattcagtctttctgccccaacttgtctcttttcttcaatattgataccaacagtttcccaaaactgctaaggataattttagagtattgaaagcagaacgtagaataagaagaatctgaatggcacaagttcatgactgtagacaggtaataaatataatattaaccacgaaggatacaggtctttgactttcattttatccaacagggttaatagtgtttcgatctgaaagagaaagttctaacactttagacctgttgagatcagcaatcattttcagtgtctcaatgagccttttttttttttttttttttgagacagagtcttgctctgttgcccaggctggagtgcagtggcgtgatcttggctcactgcaacaatgagcccaatttttcagtcctttcaaattctttgtcaagggacatgtggctgaagtctaaagtcaaagtcaccctgtcctttcactgtgttgtggctcctcagacagaagagcatacacaaaataggagtaaatgagtgataaccaaaattagtaacagtaaagcgtaagccctacattagatagagctcacctaatgttgtcacataatgttgtgtgtcacttactaaaatttcttggaaagcataggaagcaccgcattaatggagagaatagaacagtgatttttagagctgaagctttgaaggataatatatggatgaatagtcaaaggaaaaagcaccctctgtgttctataggcctattaagctactgcagtcattcatttagcaaatctttcctttcctgctgctgttattaacatggtactaggcactgggatgcacaagcatttgagagctgaaagacaggctccacatcctactggtggggaaaaaggggagtgtaggatgtgaaaagtttataacagtggctggccatgggatcatgtcttaaattgctaggacttatccaattttaatggagaaagaggaggaatcagatggaggtggaaatgatcaggtgtcagagatcatgagtctttttgtggattataagtaatttcattcttttgcactttctcttgacctctgaagaccagcagcagcactggtgagaaggctagaactaactgttatatgataactgtaaaccagaaaaaatgtcagctggcccatgtcaatattatgtttcagcagtcttagcattagaattgtatttttcctgttttttttaaatgaatcatgaagcttaagttgtgcatgattgaaacttgaatattatttccacaggcttttgaagatatttatattgaaaggaaaaagaccattaagattatcctggagtatgcagacaagatcttcacttacatcttcattctggaaatgcttctaaaatggatagcatatggttataaaacatatttcaccaatgcctggtgttggctggatttcctaattgttgatgtaggtacttttgagtacattttaaaagaggatttattcttactgtgtgttgtgaaaaaaccttcaccactattgcatattatcatattttaattttgttaagcttcatatattttcaggctataggtttattcttttagaaatattaacacagccagtggaaatatatctgtgaggaatattagaacagaaatcgttcaacaaatgtaaattatttctgtgacattgtaacatttataattgagttttttatgttttctgcaaaggagatgtgattttttaaaaaatatgatttgaatgtcattcttgttaagaataaaacaaaatttagaagtaggagatgataaaagggcagagacacagattaaagagaggaaatgatgattattcataatgtaaaattggaagataagagaggatgaggggcacatcaagttggctgatatgtgagctaaaatttttctaaaaatcattatacaaatacaaagttaactttgtatttggggagagagaagtcatgaaattttaaaatatctatctcagacccaattataggaaaaaccaaaatgagacacaattgtctctatctcaaatatgcgacttgcccttcatctccagaatggcagtggggcagaggagtaggcattattattaatgtaataattttagataataaattcaaagaactgttgaatacttggatgatggaaaatacataataattctttagtttacatattattttaacgaagtagaaatatttttacaggcttctgattgagatagagaagaaatcttaaaatagtcggtgagatcaaggactctcaaatagaaactaacggtacaatacccattattatcatttcattgaatgtactctaattattttatattttaataatataacttaataatatatatgacatattttgtattaattaaaatggctttcttacattattttataacctcaatctcccagtcttatttttctcagaatgatatgttctttatcttttactaattcttctagattttcagaaacctaacctttgtgtttagggaagaaacatcctataatcagtcatagtttttagagatttgttttccatatgatgcctgacataattagaggtcaacacgcaaatttgtatatgccaataagtgctttaaaatttaaccaagggtttgcattatcgagcttttaagaaaagttgaattcatacagcatcatatgtggattagaaaatcacaagtaagcatgatcatacatagtaaaatctgactgcaaaatgttaccaaattagtcatatttactcaaaagttcaatttctcaactgttattcaaagcttcataaacttttggcttctggccaggcgcggtagctcacgcctgtaatcccagcactttgagagtccgaggcaggtggatcacctgaggtcaggagtttgagaccagcctggccaacatggtgaaaccccgtctctactaaaaaatacaaaaaattagccagacatggtggcaggtgcctgtaatcccagctactcaggaggctgaggcagaagaatcgcttgaacccggtaggcagaggtttcagtgagtcgagatcgtgccactgcactccagcttgggcgacagggtgagactccatctcaaaaaaaataataataattttcgttttcttaatcacacaacatattaaatgttaaaaacaataacttttttctataatatgtaatgtgaaaaaatttttaacatagctatatattacaccttatatgtgttatcttaggtttcctctatgagaattctaacttcggatatagtaatgatttcttgctatttttcaattaatcattcatatatcaagttatctagttactgcctaaaaaatgaaaaatgataaaatgggtatttttgtaatatagtagttttgaagaaaggctgccccaaataagaagaaattatagaaggaatgtagattttcttttctcttaaactgtaaatatgacggggtctctctcttaaaaaattatacaatattttagatattttaaaatctttaaaatattatcacaaatacactcattttcatcattcagtgtaagaaatgaaggtttacaagtaaaattgaacttattttaaattaagagatatggctgtttaataatggaaattgttttatttgaaaatttaaagtgatgattctcagtgagtataacctcctgttcaggggtatgtaatgtgcagaaatcagggagataaacaactccaatttgaaatattatttaatattttggaaacgaacaaatataatgcaaagcacagagagtaaagctccacacaatattcttgctgacagagatgcaaattttgggacacagatttgggggagtggctgattttttttttttctgaaaagtatagaaacttatctacagcagttgttcttgaaggatggtctcaaaactgaaaacgttggcacatgtaggtgagaactcataagagatgcaaattctgcccccaaccccaagacatactgaatcagaaactctggggttggatgtggcaaatcattgtaacaagccctacagatgattctgttgtatattcagatttcagaactacttatattatttgctactcagagaatggacttgtctgatttctgcaggcttctgggttatttgaaacttacttgattaaacagtgttcttcagtacaggcgtatatttgtatatatacgtgtgtgtttatagaaagatgtgaatatatatgcatatatattctcagttacaaactataccatagtcttaataatatgcatatattccgtgtcataaaactcacttaacagtggcttggagaacagacctattagtattttaggggctgtatcaattataacagacatgtcttagtctaccttttattgctgtaactgaatacctgagactggttaaagtattcaataaagaaatttatttcttaaagttctggaagctgggaagtctaaggtgaagggtccacatctggtgggaactttcttgctggtgggcacaccagagagtcccaaggcagctcatggcatcacatggcgaggggtgttcactgagagccaaactgggttttataataaacccactcttgtgatatctaactcactcccatgataacccattaagcccttactctatattccattcatgaaggcagaaccttcatgacctcatcaccttttaaaggctctgcctcttaatactgttacattgggaattaagttccaacatgagtttcaaaagggacaaacattcaaaccacagcaaaacattaaaaaaaaaattttctgattaaagagggagcatacatattttcaagtgttcttaagtggaaaataatggatgtgaatgactgggcaaatttaagagtggcatgaggagtaatttattctgctaaatacgtagctttaggaatttaaaaaaaaaagccatgttacatttagtgagacatctggaaatactacatgaggatgagcactttaaaacacttcccgcttcatcagtcagtttacctgtctctgatggtaacagcaatgaactttttgtgaacaatgactttttctacgcctgaaatagataaatatataaagttggctctcatctgttcctattcttccctcgaaaaattgaatctctcagtcactaacttattcgtaatgaagaactgcattccagacatttttcttagacatcgtctcctgctacacaggatgtgaggcaaatgaatattttccatggaactaattcagagagtaaacatatttatagatccagatctaaggtcatggaggagctcattgctttgtaactaaaatgtgtattgattgtattgctgttcatgttctttcttaagataatttacgataagaactcaaatttcttttggatactggttatggtaattgtggctgatctatctaacatgatgaagctcttattatatctatattgattgtgaagccaatgagatcagctactctcattctctcttcagtacaattgtgatttttctcccatgaaaaactatttggtagatctttggtgctaatctttagaaattgtagggcagaagcaatcttgttgagaatttgccccaactcaaaatcatgagtcttcaaaatgttttttaataagatttatactaagacatagatttagttgagtgaataccacacttttagggcttagcttcagaatcacacacttcattttgacctgagttttataattaaaatgttcaccattgttctaattaaatttttagatttaataaggaattacaaagcaattgattacaaaagtgtgaaaagcatatgcatgatttctattcaaatagaataaacaacttactttgcttacattatttcttcttattttggttaaccttcttttaaatctatttccttacagaaacatccatcttaccctatttttaggcattgactacacaactccgtatataccatcttattgttcctgttgagttgcttttagtgagtttcagaattgactttttccttttatgcttcatcattttattgacacaattaatgaaaatgttatttttataggtttctttggttactttagtggcaaacactcttggctactcagatcttggccccattaaatcccttcggacactgagagctttaagacctctaagagccttatctagatttgaaggaatgagggtaagaaaatactaaactttataatgttcttattttttaatggggtttaaaatataaaaacaatgggtatgtagaaattatgagttgtttctgtttacataaatacataggctgtttatgtatgtgtgtgtacatatacatatatacatatgcatatatgtatatatgcatatgtatactatatagtatgcatttacatactatatacagtatgcatatatactatatatagtatgcatatatggtatatatatgcatattatatacactaatagtatatatatgcatattacatatactaatagtatatatgcatattatatatactaatggtatatatgcatactaatatataaatactaattatagcattaattaaatagtatattactaaaaatagtataatactcattagtatatactagtatattactaaaaaagtataatactaattagtatatactattatatattaatatatacagaatatgaaagactatatataaaatatgcatatatagtatagtatatatattatttcatttactgtacatattagtatatatatgcatactctctctctctctatatatatatatatatacacacacagtatttcagtgcatattgtttaacaagggaataagttaatcacagtaatcctgcctttatctaatattgtcaaacaatagaatgatccaaatgagtgacttttttcatattaaatggaaatcttccctgtgctaggaagtccaagtgaaaggggaaactattgttcctaacatcatctctcatacataagtaatcaaggacctacttatatcaggtgttcaaataatatttgtttaagaaactacctgggtaaggagcattagaaaagataggtaagtgagacagcatcagccatcacatttaatttcacctttaaaataacattgcaaagtaagtggaattataactaaattatatttgagaaaactaaagctcagagagtttacttaatttgcacttaggctgcagagtgcctgaaaagatactcaattagcagagacaaacaagttataatgaataacaactaccataacctagctttaaggattgtattaaaccagcaactttgtaacacacatggaggacaacaactctattttctgtaattagtccatatcctcatgtgttggtactcctctaaaatttcttctccagatttatacctgctattttatgcctctgttctggaatgcttcccctgccctgtcccgaccctaacccgtttgtatagcagacaaacacctatctgtcctttaaggctcaatttaaagttgccttgtccgtccaccaggagacataactggatattctctctctgttcagacacctaaaatcctcattatattgtattttacttatttgtttacttaactgcctccctaccttaccttctctgagcaatttaacacggagattagtccagcttactgatactttaagtgtggtttactgaccagctattagcattatctacaaacttattaaaaagacggacggatcatgaggtcaggagttcgagaccagcctggccaatatggtgaaaccccatctctactaaaaatgcaaaaaattacccgggcatagtggtgctcacctgtagtctcagctactagggaggctgaggcagaagaatcgcttgaacccgggaggcagaggttgcagtgagccgagatcatgcaactgcactccagcctggggaacagagcaagactctgtatcaaaaaaaaaaaaaaaaaaaaagcaaattcttggatctcaccccagacctactgagtcagaaactccaggatggggataagaaacttgggttttaaccagcctcaagtgaacattagagatctttcagcctaccaaatcttcactgttatccctacaaacctaattatgactgcaatctctgctattttaattatccagtgtataacggtttccaagtataaaagaaagatcatgattatacaaaaaagttcataagcacaattcaaaaatattctatctacaagttgaaaattacaagtttcattttgtgcagaaaggtggtattagaattcattgacattaacttaattttttgagcattaatagaatgttacaatctatcacaactttcccctacaaaaccacttccttcagtgattaagccagcccactatttaactctgtttgctctttgttctttatctgtattacaggtgaattggatgcaggagaatagtttagtatattttgagaggcaaatgtctatttagttacatttgttaaccatgcaaaaagagacatttattcatgccgcagggctattttgaaggataaatgaaataatgaaataatgcatttgaggcatattgtagtcagcttgtttgagtccttaggctctttagctttcccaactggcttctcatcagaccaataggtgcctgtctttctcagagacccatgattccatcattactcacattttttagaaaaacattttaaacaccaactatgtgtcaggtgttgtgatataaaaaacacagagtacagtggtacatagaccccggtccccaaagagtgagtagggtcaatggttacaagagagacagacaagggcacataatgatacaggaatatacagtagggagtggctatccggggaagtctgggaagacatcacaaggaggtgacatttcagacatttcatgactgaagagtaagccccaaatcataggcagataggcattcaaggcagtgataccacatggtagggaggcacagaatagattgtgcaaggtgtgcttggtcagtgactagatgtatcagagtgcctacgtgataaacatagtagggagggcagcaggaaatgagcatgaaaaggtaggctctattaagagctggctactttgaacttcattctctattcctattcctcctaatcttttttgaggtcacatagactgtaagaatctgatgaaagttagaattgtctttccggaaagacagcacaaccataatgtttgttatataatttcatgcccccaggaaacctctacaggtccatgaactccaaataatcattgctctggaccaaaggtcaacaaaccccagcctgtttttgtaaaaatgttcttggaacacagccataccagtttgtttatgtatgacccatgactaccatggcagagttgaatagttgcaacggagatataacccacaaagcctaaaaatatttataaaaatgtttgcaaaccttctccctagatgatctgattagtagtcagagatccttagtatttctctattttaaagcatcttgagaacctgcttaatacattgcagaaaagaaggatcccagtgctccttccctaacaggttaatctttaacacatttgtacttgaatgggtgctcaagctgaagtgtaagatgacaggtaggttttgaaagattaagtaaataagaaaatctggagagtgttaaatgccacaggaattgccctggatgaaaactggagtggcaaagacaaactggtgatcaatagcagtacaaatgctgaaaagcagaaataaagaaaggattaaagaaaaactgttcctaatttttgtcttaactgaggccagcactatatatatttagtcaaaggcttacatataaagtatttagagtaataataataaatttaaaacgattgctcttatttcgtagaaccagccaaatctaaaggatttaaaccatttaaagattctcaatccttttgtggagaatgtctcaaaaaaagagaataagaaaagaaaataattaaattaaattaaaatgatgtccagtcataattccacctacctgatatacaccaatagtttctctatgggggaatctttaatgctggtaataataggatcatgaacatttaaatgtatataaatatatatttttcatttatgtttatacatttcttttttttccagagtgtacagattttacaagtttaccttatcaataacaggttttggtttattatttttatttattttacatttatttaagctattatattatcttagttattttgtcttatattttgctaacaattttattgtgtgataatcatgtaatttgtaagcctggtgatcacagagttcatgtcttattttgtcttgcttggcacactgctgagtgtagagtaggcatttaataaacatgagtcggctggttggtttgatgtcttagatatttaagggcggcttttctaatttatttatgtctgcatggcatttctttcatgttgcctatttaacatcttactaatcctaatcatgcttttctttcttttgaatactaggtcgttgtgaatgcactcataggagcaattccttccatcatgaatgtgctacttgtgtgtcttatattctggctgatattcagcatcatgggagtaaatttgtttgctggcaagttctatgagtgtattaacaccacagatgggtcacggtttcctgcaagtcaagttccaaatcgttccgaatgttttgcccttatgaatgttagtcaaaatgtgcgatggaaaaacctgaaagtgaactttgataatgtcggacttggttacctatctctgcttcaagttgtaagtgtcccatttcatgagtgcttggtattttaatagatattggacgaaggatataagttattctttaaatagtatattaattataaattgaagataaaatactgtgtggtttttaaaacagtgccagtcttggccgggcgcagtggctcatgcctgtagtctcttcactttgggaggccaaggtgggcagatcatgaggtcaggagttcgagaccagtctggccaacatagtgaaaccccatctctactaaaaatacaaaaaaattagctgggtgtggtggcaggcgcctgtaatcctagctgcttgggaggctgaggcaggagaatcacgtgaacctgggaggcggaggttgcagtgggccaagatcgtgccactgcactccagcctgggctacagagcgagactcttgtctcaaaaaaaaaaaaaaaaaaaaaaaaaagtgttggtctttcctagaacatgttcctacatgaataagaagcatgggttctgttgcatttgagttattaatttataattgactctttggtgtcatgtggactcccatcttgcaccattcaaatattgcttcaaaaatgaacgtttttgaacttcctgcttcacactatgaagggatgagaggaacttcccacaggcatggagaaccctttaaaaaatggagaaaagatgtttcctgtcttattcataaaattttccttcacctttaaaaaataaaaggttatgtgcgaaattcacaggcaactgtaacaatttagaaataattaactgggactaagatttagaatgttacttgggaatatgtcctttttaaaaaaatctttacattaaatggacatgttgaatacagcaaaacttactagtattacttaataattgtggtaacattaaacagacaaaactctgtttatggctattttagaatatgagcttaacattcaaattctattaatgttattcttaaaggcaacttttaagggatggacgattattatgtatgcagcagtggattctgttaatgtaagtattgattatcttagcactaaactttatttttaaaagcttcttagtttatttcagtgatttccaaactataacttcatgaagcccttgggactcacatagacaatgaagaacatccacctgatagtagcctagtggttgtgagtacagcagttggagatagagcctgattcaaattctagctgtaccatatcatccaagctctacaactgacttcgggcaaattaccttaccttcttgagacttagtttatttgtctaatctataatttaatgaatctatcatttgtctaataaatgtctacaatcatccaatgcctactccatagtgttgtgaggacccaacaagaaaatagaagcagggcacttagtgcaggctggcattactaaatgctcagtaaatatgcgcttatcaaaataaaaataaaataattttaatgtatagcttttactgtttttacagtttaaaacaccttggatgagtttatgtgaaataagttccatgctaagaaactttaatgattactccctaggtaatatttttacaaaatataataaagatgtattcggaatcaaaagaaaatacatggcaaaatgtgtataaatatgataatgtctcatttacagtacttttggaaataacatatacatagtatgtcacttagttattgaattttcctaccaatatgagcacaaatatgcatatgattaagccctttgtagttatttgaagattatattatttattacataagtatgtaataaattaaataataagtatgtaatgaatacatgttgaataaattgttaagagtgattatgttaaacctcaacaatgctatggcttcttaaatcctatgtttacctaggatagcactgtttgaattacctggtcaaaccatgtgaaaaagaaaataatgaatgttactgtccatataatgctaacttttgtaaattttataggtagacaagcagcccaaatatgaatatagcctctacatgtatatttattttgtcgtctttatcatctttgggtcattcttcactttgaacttgttcattggtgtcatcatagataatttcaaccaacagaaaaagaagataagtatttcaaatatttttcattgtaatgaaagggatgaacaattattttccaaaaaagataatgtaaagtttaatttgatatcaattcatgattaattttattagaacttcatttatttttcaaataattgactagtatacaattacaaatatgcttaatcttattcatttttgcacagaaaacaattttctaaataataggttctggctaacttatgatttaggttaaacccataggttttgagcaatatatcaactattctgttttttccaatgtttcctatagaggattgaataattaagaaaaatcaatacactatttattcaaaacacattttataagtagttatttattttattttgtgtaatatatattgggttggagcttggggagaccaacgtaagatatggttcctgagctcaaggagtttatgtcatagcagaataaataacacaggtaatgaaaattaagacttgttgaatactgtaatttgagcaatcttctgaaatttttaattaattaatcttcacatcaactgtattagtttctttgacctacgagaacaggataatacaaacctgagggcttaaaacaagagaaatatattctctcacacttttggaggttagaagtccaaattcaaagtgtcagcaggtccatgttctctttaaagcctctaagaaaatatattttattgcctcttccagcttctggtagcccaggtgtttcttggtttatggcaacagaactccaatctctcccattatagtgacatgccattttccctctgtgtgtctttctcctctactagtaaggatgccagtcacactggattaagagcccactccactccagtatgacttcatcttaattacatctgcaatgacattattttcaaataaggtcacattctgaagtgctaagggttaggacttatatgtaccttcttagggcacacaatccaacccataacatcaatcacaaaagtattattacagagtctctttcacaaatgaggaaaggcacacagaggttaagtgacttacccaaggtcatatatcgagtatgtgatgaaggttagatagagtcagtagtaaattcgatgtatcttgtactctattaaactctctactatgctctatccccaaatactataatcatgataaatacaataagaaaaattaacaagcacaaaaaatatacatgacagtcagagtaaaaatagatgctgctatagaatggtttatgaaatacgtgacaattgagaaggctttggaaggtgggaaagaagacatgtagcaacggagaggcaaaagaatggctaacccacatggagtgaaacagaaatgaatgagcaaatgaattgtgttgataaaagaggcagcaattcaggggggatagcaatgctttcggttttgaagaaatttaagatttggagaaatagtaaaagatgaggttttaacctgcctgagagtagatataaaaagccgtattagaccttttttaatagcagctggtgtttcattcatatatgttgagtagggaagaatatggaagcaggagattgatgtttattaagactccatgatatgtcagatcctgtgtaaaatacttctaacataattgtagtcaaattttacaacaaatctaaaagacatagtatcctcatttaacctctcagaaaaattatcttatttgcacatggcctgacagctaaaaagtagtttcattatggatctagctccagaattgctttttctagagactgagctttacaaaaaattaatctagcagtgatgcacaaaatgactagggaaggaccaaagactatttcagaccctgcttgacctgccacctggaccacactaagtctccaaattagtcctgtgtgtcaatggagaataggaaatatgttccattaaaacattttagagggtagaatctacagtattgcttgtgatttgcaagagataaaggagtctaattctggagtttcttgtcaactaactgagatactctggttgtggtaccacctatacaaaaagagatctttggagactaaatggtagaattacaaaagagaataataattttgggtactggcttagcatctaagaagacagatgtacatgtaccaaaatgtcattagtgtgcatgattgactatttgcaagtagacaaaaatttagtaaatattgcattatttatcctgacatttacaaatacagatgtttatttttaaagatttttaaatttcatgttccattttacatttataaagtgtacactgattttcaatttatttttctcaacttaagcattatatatacatacatgtaatatataagcacacacaagtaattcctcagtcttccctgcataggataaattaagcgtgtctagaaagagcagtatgagcataaataaaacagccaacatccaattgactttaatcttcctgcttgttaatgttattcttacaacatttctactgcaggaagtaaaataggatgggttgatactatcaccaccaaagtcaggaaacagttactgatttagaagcatcaaaaactcatatcccctatcattcttccagtatttcatcttgcaatctaagtatagcttttattttctgaccttttctgaatgatttagaatttctttccactcttccctgaaaaaacatgaccaacacttcaattagttaacacatgctatgtagaagtacgtagtagatgctttgtgatgaactcatttattccaaagaaaaaaaacaaatgaaagtggtatccttttctttgcctttcctaattttaattattgtggtaaggaaacttaatatgagatctacctgcttaacaaaatttttaagtatactatatatattgttaactatagttacgaagtactacaggaagtccctagaacttattcatcttgcataattgaaactttattcccattgaatagcaattctccattctcccatcctttcatgccctggcaatcaccattcttctctctgtttccatgagtttgaccattttagttacttcaccgaagtggaattatgcaatattttttctgttacttcactcagcataaatttatccaggttcattcaagttgctgcatatggcaggatttccttctttataaggctgaatagtgtgtgtttgtgtgtgtgtgtgtacgtgcacacgcacatgcaggtatacaaataccacattttctatcccatcattcatcaatagacatttaggttgttttcatatttggatacagtaaatagtgctgaagtgaacatggaagtaaggactctgagatcctgagttcaaatttttaaaatatgctcagatgtggcattgctagatcaaatggtagttatatttttaattttttcaggaactttcatactgttttctatggcagctacatcattttacattccaacaatgtacaaaggttctaatttctccatatccttgccaacacctattatcttttgatttgggtggtttttgtttttgttttggtaatagccatcctagcaggtatgaaatgatatctctttacggttttttgttgctgtttttttttttttttttttttttttttgttgtttttttttttgagacggagtttcgctctgtcgcccaggctggagtgcagtggcgcgatctcgactcactgcaagctccgcctcccgggttcacgccattctcctgcctcagcctcccgtgtagctgggactacaggcgtgcgccaccatgcccggctaatttttgtatttttagtagagacggggtttcaccctgttagccaggatggtctcgatctcctgacctcgtgatccgcccgtctcggcctcccaaagtgctgggattacaggcgtgagccaccacgcccggccttgttgctgtttgtttgtttgtttttgaaggagtctcactctgtcaccaggctggagtgcagtggcgcgatctcagctcactgcaacctccgactccctggttcaagtgattctcctgcctcagcttcccaagtagctgggattacaggcatgtgccaccatgcccagctaatttttgtattttcagtagagatggagtttcaccattttggccaggatggtcttgatctcctgacctcatgatccacccaccttggcctcccaaagtgctgggataacaggcatgagccactgcacctggccctcattacagtttttatttgaattttctgatgattagtgatactgagcatcttttaatatacatgttggtcatttgcatgccttcttaagttgcaggagttccctatatattttggatattaaccatttattagatatatagttggaaatattttctcccattctataggttgctttttcaccctcttgaatgcttcctttttttcccaaagctttttagtttgatatggtctcaattgtctatttttgctcttgtttgaattttggagtcattgccaagaaatcattgtcaagaacagtatcatgaagctttcctgctatgttttcttctacaagttttacagttttcaggtcttaggtttaaatgtttaatctattttgagtttatttttgtgtatggtataatataagaattcaattttatttttttatatgtgaatatccagttttcccaacattatttgttgagtggcctcttttctattgtgtattcttggcacccctgttgaatatgagttaactatttatgcatgggtttatttctgggctctctatcctgtttcattggcctatatatttgttttatgccaggaccatactattttaattgttgtagctttgttatacattttgaaatgaggacctgtggggactgggtgcaatggctcatgcttataatcccagcaactcgggaggctaaggctggaggatcacttgtggccaagagtttgagaccagcctgggcaagatagactccttctttacgaagatatttgaaaagtagccaagcatgatggcacacacctatagtcctagctacttaggagcctgaggtgggaggatcactgaagcccaagagtatgaggctgcagtgagctatgatcatgccactgcactctggcctgggcaacagggtgagatcttctctctcaataaataaataaataagaaatgagaaaatgtgattcttccattttgttcttttttcttaagattgctttggctattcagagtcttttgtggttccatatgaattttaggatctttttttattttagtaaataatgctattgggattttgatatgtactgtattgaattcacagatcacttagggtagtatgggcattttaacaatattaagtcatttaattcgtgaatactgggtctttccatttatttgtgtcttctttaatttccttcatgaacattttgtagttttcagtgcatacattttcaatgccttggttaagcatatcctaagtattttatttcttttgatgttatcataaatgggatttctttcctaattttctcttcagattgtttattgttagtgtatagaaacgcaggtgatttttgtatgttgattttatatccttcaacatctagtaaatttgtttattagttctaacagattttcctgatgtgtggagtctttagggtactctccatataaaataatgtcatctgtaaacacttttttctttcagattgggatgtcttttacttgtttttcttgcctaatttctctggctaggacttctagtgctgtgttaaatacaagtggcaagagtagccatatttgtcttattcctgatcttacaggaaagtttttcagtttttcaccattgaatacgatgttagctgtgggattttcaagtagtctttgttatcatgaagtatatttcctctgttctcatccatttgtgctactataacagaataccacagactgggtaatttataatgaacataaaccttatgggatcacagtactggaggatggaaagttcatgactgaggggctgtctggtgaggtcttatttgttgtgtcataacatgctgtaaggtatcatgttatgatacacatggcacaaagagagaataagtgagaaaaggaggcagaacctgcctgtttataatgaactcaatcctgagataacagcattaatgcatttaaaagggtaaaattctcataacttaaacacctcttaaaggtctcacctcccaattctgtcacaattgcaattaaattgcaacatgagctttggaggggacaaaccttcaagttatagcaacttctatacctagcttttgttttctttttttagtttttaccatgaaaggttgttgaaatttgtcaaatgcttcttctgaatctcttctgatgatcatgtgatttttatccttctcagatcatgtggtgtatcacattattggtctgcatatgttgaaccatccttgcatcctagggacaactcccacttggtcgtagtacatgatcatttaatgggctgttgcattcagtttgctaatattttgatgaagttatttgcatctatgttcatcagggatcttgttctgtagtatgtttttttctgtttaaatatttgttcatttttaattgacaaaaattgtgcttatttatggggtacaaaacaatgttttgatctacataaacattgtagaaattttcagtcacgctaattaacataaccatcacttcacccacttatcatttttttgtggtaagaaagttaaaaagctattcttttagcaattttgaaatatacatttatttttttcatttcctattgtgtgacttttttgacttttattttaagttcaggggtacatgtacaggatgtgcagtcttgttacataggtaaacatgtcataggggtttgttgtacagattatttcatccctgaggtattaatcccagtatgcattggttatttttcctgaccctctccttcctcccacccttcaccctcccataggccccagtgtgtgttgttaccctttatgtgtccatgtgttctcatcatttagctcccacttataagtgagaacatgtggtatttggttttctgttcctgccttagtttactaatgaaaatggcctccagctccattcatgtccctgcaaaggatatgatctcgtttttttttgaatggctgcatagtattatatggtatatatttaccacattatctttatccagtctatcactgatggtcatttgagttgattctatgtctttgccattgtgaatagtgctccaataaacatatgtgtgcatgtgtctttataatagaaaaatgtatttccctttaggtatatacccagtaatgggattgctgggttgaatggcatttctgtctttaggtctttgaggaattgccacacagtcttccattatggttgaattaatttacactcccatcaacagtgtgtaggcattctttttttctccacaccctcgccagcatctgttattttttgactttttcataatagccattctgactggtgtgagatggtatctcattgtggttttgatttgcatttctctaatggtcagtgacattgagctttttttcatatgcttgtttgttgcatgtgtgtcttcttttcagaagtgtctgttcatatcctttgcccactttttaatggggttgtttatttcttgtaaactcatttaagttccttatagattctggatattagacctttgtcagatgcatagtctgcaaaaattttctcccattctgtagactgtctgcttactctgttgatagtttcttttgctgtgcagaagctctttagtttaattagatcccatttgttaatttttgtttttgttgcagttgcttttggtgtcttcatcatgaaatctttgcccatgcctatgtcctgaatggtattgcctaggctgtcttccagggtttttatagttttagattttacatttaagtctttaatccatcttaagatttattcctctactctaaatgaaaaatgtacatcctttgatcaagatttatactttctccacatcgtcttcccccagtcctatggcaaccacctttatatgctgtttctgtaatgttgacttctcacttttttattttttatttatttatttttttattttactttaagttctagggtacatgtgcacaacgtgcaggtttgttacatatgtatacatgtgccatgttggtgtgcggcacccattaactcgtcatttacattaggtatatctcctaatgctatccctcccccctccccccaccccattttacatgtaagtgagatcatgtggtatttgtctttctgtacctggctaattttgcttagcataacgtcctttagtttcattcatgttgggatgaatgacaaaatttgttcttttaaagttttgtatagtagtgcactgtgcatacctatcacattttctttattcattcacctgttgatgggtacaggttgcatgtatgggttagtgcaaaagtaattgcggttttggccattacttttaattgcagcaaaagtaatggtaaaaactgcaattacatttgcaccaacctaatatgtcttggttcttgtaaataatgctgaaatgaacatgggagtgcaggtatacctttgacagaacgattttaattcctctaaaggaattaaatatataccactatatacctagaagtggaattgctgaattatatggtaattgtatttgttttgggaacttccatgctatttttctcaaacagctgtactaatttacattttcactaacaatgtataagggttcctatttctccacatcctcatcaacacttgttatcattcatctttttgataacagccattctaggaggtgtgaggtaatatttcattgggattttaatttgcatttttctgatgattagagatgttgagcattttttaatatatctattggccattcatatctcttcttttgagaaatgtctgttcagattatttgcccattctacaattggtttattgattttctaggtgttgagttgcttgagctttttatgtataatgttggatattagccctttatcagatgtatggtttgcagatattttatttcaatccatgatctctctctccactctgttattgcttcgtttgctgtaaagaacatttttagtttgatctaatccaacttgtctcttattgtcttttgttacctgtgcttttagagtcctagccaagaaatccttgcccagataaatgtcatacagcttttcttttatgttttcttctagtagctttatagtttcatttcttatatttaagtcttttacttgtttggttttataaacatatggtatgagaaagggcccaatttcattcttttgcataaggaatattcagttttcccaacaccatttattgaagagatcgtcctttcccccattgtttattctttgcacctttgctgaaaatcaattgactataaataattgggtttatttctgggctttttatccttttccattagccaatatatctgtgtttatgccaatagcatagctttatattttgaaatgacagagtattgcacctctagctttgttctttttgctcagattgctttggccatttagcatcttttttattttattcaaatgttaggattttttactatttctgtgaaaactgacattagaattttgatagggattgcattgaatctgtagattattttgggtagtatggacattttaacaatattaattcttccaacacatgaacatgaaatatattacaatttatttgtgtcttcctcagtttttttaaatcaacttatagttttcagtgtacagatcttcaactttcctggttaaatttacttcaaagtattttatttatttattttgatgctgttttaaataggattaatttcttaatttctttgttggatacctcattgttaatgtatagaaatgctactgatttttctatgttgattttgcaaactgcaactttactgaatttatgtatcagttttaacagttctcagtagagtgttcagggttttctacatataaagatcatgtcattagcaaacagagataattttatttcttgctttcttacatggatgtattttatttctttttcctgcctaattgctatggatgggatttctagtactatgtcaaaaagaagtggtaatagtcgatatccttgtcttgttcctgatcttagaagaaaagctcccaacttttcagtttttgcataatgttagccgtgggcttgtcatatatggctttattttgttaaggtacattccttccatatctgctttgttgagattttattatgaacatatgctggattttatcaaatgctttgtctgcatctagtaagatgatcatatgatttttgttcttattttgttaatgtagcatatcacatttattgatttatgtatgtttaaccatttttgcatccctcagataaatcccaagtaatcatggtgaatgatgttttaaatgtgctagggaattcagtttgctaatatattgttgtgaatttttggatctatgttcatcaagaatattggcctgcagttttcttttctggtagcatactcttagggttttcatatcagtataatactggcctcataaaatgaatttgacctccttttcaattttttggaagaatttgagaagaattcatattacttctttaaatagaattcaccagtgaccttttccttttttttttttttggttaggagacttaatttattactgatctattttctttatccagtattggtttgttcagatgtaatatttcttgatttagtcttggtaggttgcatgtttctaaagattagttcattccttctaggttattcaatttgatggtgtatggttgttcacattaatagtttatgattccttgtatttatgtgttatcagtgttagtctcccttctttcatttcagatattgtttgagttgtcttttttcccttggttagtctagttaaaggtttttcgattttatcttttcaaaaaaacaactttttagtatttgctttgtttatttctatcattatctttgttattttcttccttctgcaaagtttggggatattctgttcttctttttctaatctctaagatgtaatattaggttgtttatttgagattttccttctttctttaatgtaggcatttattactataaatttttctctcagggcttctttttctacattccatactatttgttatcttgtgtttccattgtcattgatcccaaaatattttctgtttttccgtataatttcttctttgacccattgcctgttcaggagcatgttgtttaatttccacgtaattatgagttgttcaaggttattcttattgacttctagtttcatgtcatcatgaacagaaaacatactcgatatgattttaatcttcttaaatttgttaaaacttgtttggtggcctaacatgtgatctatcctggagagtgtttcatgtgatttgagaagaatatgtattttgttgctgttggatgaactgttctataaatatctgttagatctattggattaaagtgtagttcaagccttcctctaataagaaactgcataaattatgtcaggagcaagccagggaagaagccaccttcctgttcttggtggtagagaccttccacatcttttaaaagaaagattgtggccgggcgcggtggctcacgcctgtaatcccagcactttgggaggccgaggcgggcggatcacgaggtcaggagatcgagaccatcctggctaacacggtgaaaccccgtctctactaaaaatacaaaaaattagccgggcgtggtagcgggcgcctgtagtcccagctactcgggaggctgaggcaggagaatggcatgaacccgggaggcggagcttgcagtgagccgagattgcgccactgcactccagcctgggcgacagagcgagacagcgagactccatctcaaaaaaaaaaaaaaaaaaaaagaaagattgtagagttgggattgtctctggaggaagccagggaagaaggcgtggggaatgttattcctcttgtttaggctgaagaaggtttattcttcatttgctatgtagatttccaagtactggaagaggccagaaccacagggagcggctggaaaacgtgtagcctaatggtttccatggggaagttggaagatggtctgatcccaggaattaaagcttctgagagtgctcaggcagttcaaaaccccccatcgttttttgtacttgagagaaaactccaatggcttatctctgccattcctcaagcatggtgatctaaaagccaagctctgtgtcagggcctataaaagttgggttctacaaaatggaaaaccaaggcaattatgaagatgattttataatatagttcatctcttctctctttacactctagaaaaagcattttctagaaataaatacatttccttaaattaaaaaaaagttgggttctatatgtgtgctatagtttctcaacccttgggaagtagctgcaaatttggttttcttcccaaatgtaaggcactgtgctcagggtggggttagtgcatgagtgtctttccactttttctacccattttgatatgggtattttctgtcctctggtgtgcatgagtttttctactggattctgggtttctctggagagaactgatccatgtgtatgtagatgtttacttggtacgtccatgagagaaaaaatagtcataaacctcctattccacaatgttgctgaagtcacttccttcaaaagctgtaattttcttttcttacagtgtctttgtctggctttgatatgagaataattctggccccataaaatgactttcgaagtgttctttcctcttcaaagttttaagagagtttgagaagaattaatgttgtttcttctttaaatgtttggttggacttctccagagaagccgtctggtcctgtacatttcttttttgggagttactatcattatcattattattattattattattattattattattattggttcaatttgtctattcagttattctatttcctcatgattcagtcttggtaggttgtatatttttggaatttacctattccttctaagttatccaatttgttggtgtataattgttcatggtagtctctttgatccttcttattcccataaaatcagttgtaaattctcctctttcatttctggttttacatatttgagtcctctatcttttttcttagttatgcttgctaaggatttgtctattttatctttcgaaaaaaccaattcttagttttgttgactttttctattgcttttttattctctatttcacttacttagctctaatacttattatttccttccttttgctgatgttgggcttagtttgttctttttctagttcctagacatgtaaatctatattgtttatatgagatatttctttttataatgtagacatgtatctcaataagatttgcttttattactgcttttgctgcatctcataaattttggaaattgtgctttcatttttgtttgtttcaagatacttttaaattttcctattgattttttttctttgacccattgctttttcaagagagtgttgtttaatttccacatatttgtgaatttttcagttttccttctattactgacttccagtttccttccattgtggtcataaaagatatctggtatgatttcaacttcttaacagttgtcaaaacaaacttcatgacctgatatgtgatctatcctgagaatattctgtgcgcacttgaaaagatggtatattaagatgctgttgggtagcatattctgtgtgtttgtgatccatttggtctatagcgttgttcaaatccacagtttgtttatagattccatatctggctgttctgttcattattgcaagtcgggtattgatgtatcctactgttatggtgttgctgcatgtttatcccttcagatctgtcaatgattgctttacgtatttacatgctttgatgatggattcacatatatttataattgttatatcttcttgatgaattaactcttttatcttattttatgacctactttgtctcttgtgacagttttttatttaaaatctattttggctgatataattacagggtgtcctctgtgtctgtgggttttacatctgtagattcagccaatgctgattgaaaacactgtattcatggaatgtgaaatccacagatacagagggtcaaatttttttatccacaggtcctgcaagactgactgtgggacttaagcatcctcaattttggtatcccttggggttctgaaaccatgaccctgtagatactgaaggacgactgtatagccccattgctctcttttggttaccatttctacaaaatgtatcttttttatcaattaactttcaaactatgttttcttaaatctgaaacgagtatctggagacagcatataactggatcttgttttcataaatctatgcagccattgtaggtcttttgattgggaagtttaatccatttgtatttgaaataatcattggtaggtaatgacttactattgcctttttgttaaatttttctgttttgtaattctttttttctgtctttttctctcttaactgtcttcttttgtgattggatgatattttattgtgatatgctatgatttctcttttttatttctgtatttttacgtggattttccttgtggttatcatgaggcaatcacaaatatcttataatagtctactttaagctgataacaacttaacttcaatcatatatcaaaaatcttcacttttaatacctccctcacactttttgttatgtcacaatttacatctttttataatgtgtttctacaaacacatttttgtaattttagttattcttaattattttgacatttaacttttatattagaattataaatgatttatataatactattagagtattacagtattctctatttgtccatgtatttacctttactagtgagatttgtgctttcatatgctcttgtgttgctctttaccatgctttcgtttcaacttgaagaactcactttagcatttcctataagataaatctagtggtgatgaactccctcagcatttgcttgtatgagaaagtttttatccttccttaattttaaaggacagtttttccaggtatattattcttggtcagcagtttttttctttaagtattttgaatatatactttcactttatttgctcttttaaagtttccactgagaaatctgctgttcatcttaagagagctcttttggacatgacaattcagtttttttcttgctgctttcaaacttccctttcacttttggcaatttgatgatattatgtctctagtggagactttctttcttttttttccgagatagagtttcaccgtgttgcccaggctggagtgcagtagcatgatcttggctcactgcaacttccacctcgtgggttcaagcaattctctctgcctcagcctcccgagtagctgggattataggcacccaccaccacacccagctgatttttgtaatttttggtagagatgtggttttgccatgttggccaggctggtcttgaactcctgacctcaggtgatccactcccgctcagcccctcaaagtgctgggattacaggtgtgagccaccatgcccagccgagacttctttagatttgtcctatttgggattctttgagtttcctgaatttagatgttcatatctctccccaaatttgaacatattttagtcatttaaaaaatatttttacacccctttctgtcttctctgtgatttcataatgcatatattgttccacttaatgatgtcccatgaaccttcactcatttttttttttatttcttcttgctccactgactggataattttaaatgatctacctttttttttttttttggtgtccatcttttgagggttttttaattttattttttatttttttatttttattttttattatactttaagttttagggtacatgtgcacaacgtgcaggttagttacatatgtatacatgtgccatgttggtgtgctacacccattaactcatcatttaacattaggtatatctcctaatgttaggtatatccccctcctccccccaccccacaacaggccctggtgtgtgatggtccccttcctgtgtccatgtgttctcattgttcaattcccacctatgagtgagaaagtgcagtgtttggtttttttccttgcgatagtttgctgagaatgatggtttccagcttcatgcatgtccctgcaaaggacttgagctcatccttttttatggctgcatagtattccatggtgtatatgtgccatattttcttaatccagtctatcattgttggacatttggcttggttccaagtctttgctattgtgaatagtgccgcaataaacatacgtgtgcatgcgtctttatagcagcatgatttataatcctttgggtatatacccagtcatgggatggctgggtcaaatggtatttctagttctagatccttgaggaatcgccacacggacttccacagtggttgaactagtttacagtcccaccaacagtgtaaaagtgttcctatttctccacatcctctccagcacctgttgtttcctgactttttaatgatcaccattctaactggtatgagatggtatctcattgcggttttgatttgcatttctctgatggccagtgatgatgagcattttttcatgtgttttttggctgcataaatgtcttcttttgagaagtgtctgttcatatcctttacccagtttttgatggggttgtttttttcttggtttgttgattctttctccagtttgatcaagtctgctattgaatcctctagggagttttttagttcaattattgtattcttcaattccagagtttttactgatatttgactttttgtgtgtgtgtgtatagtttctttcccttcattgatatcctcattgtgttcatgtatcatcttcctgattttgtttagttgtctatctctgttctctggtactttgctaaacttcattaggataattattttgaattcttttttaggcaatttataaatctctatttctttagggtcagtaactgcggatttcttttatccctttttgttgtttccctaattctttgtgttccttgtgctttgcattggtgtctgtgcattggaagaatagccacctgtcagccatccgacacaatgtcacaaaggacacaaaacagccaccaagatttatggactgactttgacagggcaagacctttgccagtcagcctggctagagatactgagagtctctcaaacagctaatctaccgtccccttttcctatgtttgtagctgtatcaattgttctaatcatactggttctttcagtgctccatatgaggcaagagtgaaactggaccctagtgcagcacactgaatggcaaggacatttgatgtgctccactcctctccctcccttgaaagtggtatcttgatgaaaatgaataaattagcccctagaaaggatggataaattgtttcaaaccaagtaacaggataccagcacagttatgattgaaatgcctgtttgatttgaaaacccatatcttttccacaatgcaatgttgccacttactgctttttaacttcaataatttgatcaaagcttatggctctatcaactacccatgcctctttctaataaccaaccctattttactagtttttccaactattcatcatcctcataagtacttttttcacctctaatgatttcatgtgaaattagtttttaataatcataaaacatactactattagaacaaaagtcattaatgagttcaagttataaaaaggaagattacatgatatacaaatatataattacaaatttgagcaactatggagtaaatgttaacaataacctcatttcattaactctcatcttatcaggaagtttaatagcaccaacagtaatagtaactaaaatttaatgaagacttaccatgtgccagatattatgctaagtattcttcatgcattacctcaatttatcttctcagcaaacacaaatgcagtgactactcttataatgatgaggtggttttacttaaagaattaagaaacttacccaaggacaaaagaaaggacttgaacaaagatgatctgacaccagaagtgaagaagtctttattactatgtaatacagcctcaatgtagattgtaacacagaaaaaaactagcctgacttacagaattccttccacctaggttttaaagggatacattttgcacaaggcctaaataagctataggaaaacaaaacacccacgcaagtttctctattgaattaattcataatctcctattagttttatcccattcttcatcatattgacaaccaggatatcattaggggaaaacaaaatctattactttgattttctcttcaaagttggagttttctcctcagtttttctccagcttcttctgtcaagttcttggcatgctgtaattttcagtccccattaatgaacagtaaaggatctgggtttctcttgacattgacatgaagtctgtctctctcatgccttgccagtaggtgagatgaatatgaaaattacataaagactgcatattaaatagaggaaagctgaattaaaacactctaaggtggccggatatggtggctcacgcctgtaatcccagcactttgggaggccaaggctggcagatcacttgaggccaggagttcaaaaccagaccagccaacatggtgaaaccctgtctctactaaaaatacaaaaattagcctgatgtggtggcatgcacctgtaatcccagctacttgggaggctgagacatgagaattacttgaacccaggaggtggaggttgcagtgagccaagatggtggcactgcactccagcctgtgcctcagagcaagactccatcaaaaacaacaacaacaacaacaacaacaacaaaaacactctaaggcagaaagggaagtctggttaccattaggtgtttgatgaataagaaaattcaatataatgggaagcttcccattcaatagcaaacaattaaaaaaataagtaaataagaggaagctgaatattaccaaatccaagagaataaagggaaaccataaccaggtcatctttaattccagcaccctacaagttaagtaatgatctcagaactataaatccttgaaaataaattcttaattatatggattatactaatttatgctgtgacttaaaaaggtgaaattatagactaatgtagaatatacataaatctgtaaaacttacagctaacttaagaaattagcagagaacaaagggagcaactgaagcttctagcccccctttgtaagatttaggcttttccagtcaaaaacctcatttagatgttatgttatttactgttgaattttaaaagttatattttcttttatgtaatcaattggaaagtccttcagtttgggtatgataattgataacttcctcagtacctagaaatctatcaaggataatgttgacatccaataaagtgtttatgttgaaatcctttatttagaattaaaaaggtagtcaaagagtttcttgaaatagagatatagaaatgtatattatcattttagtttatattcattttttatgtaaaggaataatggtatattaaaatgaatataaaattaatacaattttggttattgtatgtagcccctattctttttttattattatactttaagttctagggtacatgtgcaaaacatgcaggtttgttacataggtatacatgtaccatgttggtttgctgcaccaatcaactcatcatttacattaggtatttctcctaagtaatccctcccaaagctcccaaccccctaactgcccctggtgtgtgatgttcccctccctgtgtccatgtgttctcattgttcaactcccacttatgagtgagaacatgcagagtttggttttccgtccttgtgatattttgctgagaatgatggtttccagcttcatgcatgtccctacaaaggacatgaactcatccttttttatggctgcatagtattccatggtgtatatatgccacattttctttatccagtctattattgatggacatttgggttggttccaagtctttgctattgtgaatagtgctgcaataaatatacatatgcatgtgtctttatagtagcatgatttacaatcccttgagtatatacccagtaatgagattgctgggtcaaatggtatttctagttttagattcttgaggaatcatcacactgtcttccacaatggttgaactattttacactctcaccaacagtgtaaaagcgttgctatttctccacatcctctccaacatctgttgtttcctgactttttagtgattgccattctaattggcatgaggtggtatctcattgtggttttgatttgtgtttctctgatgaccagtgatgatgagcattttttcatatgtctgttggctgcataaatgtcttcttttgagaagtacctgttcatatcctttgcccactttttgatggagttgtttgtttttttcttgtaaatttgtttaagttctttgtagattctggatattagcccttttgtcagatggataaattgcaaaaattttctcccattctgtaggttgcctgttcactctgatgatagtttcttttgctttgcagaagctctttagtttaattagatcccatttgtctgttttggcttttgttgccattgcttttggtgttttagtcatgaagtctttgcccatgcctatgtcctgaatgatattgcctagagtttcttctagggtttttatggttttaggtcttacatttaagtctttaatccatcttgagttaatttttgtacaaggtgtaaggaagggatccagtttcaactttctacatatggctagccagttttcccagcatcatttattaaatagggaagcctttccccgttgcttgtttttgtgaggtttgtcaaggatcagatggttgtagatgtgtagtgttatttctgaggcctctgttctgttctgttggtgtatgtatctgttttggtaccagtaccatgctgttttggttactgtagccttgtagtatagtttgaagtcaggtagtgtgacgcctccagctttgttctttttgcttaggattatcttggctatgcaggctcttttttggttccatatgaactttaaagtagtttttttccaattttgtgaagaaagtcagtggtagcttgatggggatagcattgaatttataaattaccttgggcagtaatgccattttcatgatattgagtcttcctatccatgagcatggaatattcttccatttgtttgtgtcctcttttatttcgctgagcagtggtttgtagttctccttgaagaggtccttcacatcccttgtaagttggattcctaggtattttattctctttgtagtaattgtgaatgggagttcactcatgatttggctccctattctttataaaagttctaaatatttgccaaatcatcaaagaagatattcattacttttaattcttacaaattttcttagcaataaaagtcacagtaagacagctagcagataaaaaagataaaagtacatagtttaaaacaacactgattagcacaccaaaagaatattgagccaatccttattatatgtaatacaaatatttatatatgcacatttaactgtgtttggagacccatgtttctacacatatgtaattatttaagatatattttatgtatagctatcatgaacataataaaatacattttatttctatattaacacattttaacctattttagtaatctatagaaagatgtagacaatgattctggttttaactacatttattttttgtttgtttctttaccttggaggtcaagacatctttatgacagaagaacagaagaaatactataatgcaatgaaaaagctggggtccaagaagccacaaaagccaattcctcgaccaggggtaaaaaaatatatatatctttagcatatagattttcaaattatttctaattcatttttaatgcacatctttaatttctggataatacttgaaaagtttactctgcattcgatattattcttatttctttgcagaacaaaatccaaggatgtatatttgacctagtgacaaatcaagcctttgatattagtatcatggttcttatctgtctcaacatggtaaccatgatggtagaaaaggagggtcaaagtcaacatatgactgaagttttatattggataaatgtggtttttataatccttttcactggagaatgtgtgctaaaactgatctccctcagacactactacttcactgtaggatggaatatttttgattttgtggttgtgattatctccattgtaggtaagaatatttatttttcagattttattttttgagtaaagctaaacttcacttatgctcaaggaagtatatgctgaattcttgaacacaaatttactcttgagtaagtcagtacaatgaaagaatgaaaaaatcctaaaaagcaaaacaaatatctgtctctcatactacagtgtttctgggtttacactacaggccccaaagccaaatatttctatctattagaaggaaattatacttgttgatatttagtttccaatattacctttgcaaaactagttaccatgtttatatatagctgtgtcttggaaaaccaatgttgaatctgaaataacttctggttttagcacatgtgagacttgtcatttgattaatgataatattaatagccagaatatctgtgaatttgtgaaaattcttccagaatttaaagtgaagttaagatctctagaaatgccagttttattttttacagcttaatacttcacaagtgtataaaatgccaatcattcctcaaccagccatggtgttcatgtctgtgaataacagcacatgattttatacttcctatacattcattgccatggttgtttttctatcttcttgtttttgttgttgttgttattttcacatatcttgcaaagtattttaggattgtatttctttttagaattataaacttttaagagagagagattatagagattactacaagtttaatcaacaggttatcaatctgaaaaggttcaaggttgcatgacttagaatcataaaattgagtgccacataacagagtaagcatttaaaatcaataattttggaaaagcatattatcaccagaagtcataccaaaattgatataagaaaatgtattaaaatttaggtgagaatttcacactaacaaaaatgattctgaaagcattcctattaagtcaggaaaaaaaaaagagtgtgcctgtatcatccctgtttttagtgttgttggccaatgcaattagataagaaaacagagaggtacatatataaaaacaatggagtaaatgatccttaatataatgaccttcttcatataatgaaagaacttgttcatatattgaaagagaatcaactaaaaataaattcaattagagttcaaaaggtacaaattttaaattacatgtgccaacactaataattatcttatacatgaaaaaaattagaaaatctgattcacaattgcaataaaaataaagtaaattatctaataataactttatcatatgagacttctgaagaaaactttaggatataaaagaaagctaaaataattgaaaggattgtcatgtacttagataagcttctctcattgtaattaagactttcaaatttattaatctataaattcaaggaaaatatcaatgagtctttttatgtagtgtgggtaataaatagacaaaaacaatataagtctaaatgattctaaattcatctggaagaaaattagggtgacaagaggtggcttattctgcaaaatattaagacatatagatgttaaataaaactgttcaaatataaaagctcagtgggtttgaagagagtccaaattaaactttaatgtataattaccaatttactgtgtgaaaagatcacatgaatcaaaatctaaagttaaaaaaaaagattctagtaggaaatatgtggaaatagacatataaccatatactcttatagtcctttctatgcaaaacacaaatttgtaaagccaaaaaaaaaaatgaagaagaaatgactgcacaaaaaaacaaaatattctttggggaaaaaatcatcataaataaaaggttgaaagacaaaaaataggtgaaatgtttacataacagttaaggccgagaaaggatcaatactttaaatagaaaattgttcttataaattaataagaatatagtaaaaatcccaatagacacatgggcaaataccaaactaagccaaaaacagaagttaaaaacaaccaataaggatacaaaataacaaaacacaaggaaaattgtggattattttcacaaaaaatgcaaataaattacaatagtagatgttttcaaatgtcatgaaaattttttggtaaaaaactataaagaagaatggtagcactcaatactgttgaatgtgtaaagtatgagcactatcatatactgccattagaaatgttaattagtacaggctttctggagataggttcagctatatattgtgtgtatatatatacacatacacacacatactatgtatatagtatagagtatgtatatatgtatactatatatatacatactctatactatatatatagtatacgcatactctatactatatatatagtatacgcatactctatactatatatatagtatacgcatactctatactatatatatagtatacgcatactctatactatatatatagtatacgcatactctatactatatatatagtatacgcatactctatactatatatatagtatacgcatactctatactatatatagtatatgcatactatatgctatatagcgtatatgcatactatatgctatatagagtatacgcatactatatgctatatatacatactatatagtatacatatactatgtactgtatatacgtatacttagtatatgtatatgtatatgtatagtatatgtatatgtatagtatatgtatactatatactgtatatagtatatatagtatgtgtatatatatagtatgtgtgtatatatagtgtgtgtatatatataaacatatatatactgttgacccaagttctattaacatattattaaaaagtactcatgcaattaggagaacatagctatttagatattcatttcagtaacaaaaatggaaacagtataaatgctagtcttcaatttgtggttattttgagagaacattataccactataataaattatttcgttgtcatttttatgaaactatctccatgacatataaagtaaataaaataggttacaggctgggcactgtggctcacgcctataatcccagcacattgggaggccgaggtgggcgaaatcacttgaagtcagaagtttgagaccagcctggccaacaaggtgaaaaccgtccctaccaaaaacacaaaaattaaccaggtgtggtggcgcatgcctgtagtcccagctactctggaggctgaggctggagaatcatttgatcccgggatgcagagattgcagtaggccaagatcacaccaccgcactccagctttggcgacagagcaagactctgtcttgaaaaataaataaataggttacaaaaaaagcttatataacatgaatacatttgtttgtgtgtgtacatgtgcttgcacagaaaaatgtctgaagtgatactcaaaaaaatattgataatagttattgttgacatttcaggtgatttatattttctttttagcatttaacggtattgcttgaattttctatgtgagtaggtatcattcttaaaatgtaaaacactattatggagggaaaaaatggcccatgaacttagtaaaaaggagaaaatgtcacaatggtaatgttagtcatttctctttggaatttcttaatccttttttaagtaattgcattcagtataaaataactgtcttggccgggcacggtggctcacgcctgtaatcccagcactttgggaggccgaggcgggcggatcacgaggtcaggagatcgagaccatcctggctaacaaggtgaaaccccgtctctactaaaaatacaaaaaattagccgggcgtggtagcgggcgcctgtagtcccagctactcgggaggctgaggcaggagaatggcgtgaacccgggaggcggagcttgcagtgagccgagatcgcgccactgcactccagcctgggcgacagagcgagactccgtctcaaaaaaaaaaaaaaaaaaaaaaaaaaaaaaaaaaaaaaaactgtcttgaattcataagaaatgagttgacagataaaactgtttagagtcatcatttcaggtagcatacatctttaaatattttatttctattattttcctccacatacaggtatgtttctagctgatttgattgaaacgtattttgtgtcccctaccctgttccgagtgatccgtcttgccaggattggccgaatcctacgtctagtcaaaggagcaaaggggatccgcacgctgctctttgctttgatgatgtcccttcctgcgttgtttaacatcggcctcctgctcttcctggtcatgttcatctacgccatctttggaatgtccaactttgcctatgttaaaaaggaagatggaattaatgacatgttcaattttgagacctttggcaacagtatgatttgcctgttccaaattacaacctctgctggctgggatggattgctagcacctattcttaacagtaagccacccgactgtgacccaaaaaaagttcatcctggaagttcagttgaaggagactgtggtaacccatctgttggaatattctactttgttagttatatcatcatatccttcctggttgtggtgaacatgtacattgcagtcatactggagaattttagtgttgccactgaagaaagtactgaacctctgagtgaggatgactttgagatgttctatgaggtttgggagaagtttgatcccgatgcgacccagtttatagagttctctaaactctctgattttgcagctgccctggatcctcctcttctcatagcaaaacccaacaaagtccagctcattgccatggatctgcccatggttagtggtgaccggatccattgtcttgacatcttatttgcttttacaaagcgtgttttgggtgagagtggggagatggattctcttcgttcacagatggaagaaaggttcatgtctgcaaatccttccaaagtgtcctatgaacccatcacaaccacactaaaacggaaacaagaggatgtgtctgctactgtcattcagcgtgcttatagacgttaccgcttaaggcaaaatgtcaaaaatatatcaagtatatacataaaagatggagacagagatgatgatttactcaataaaaaagatatggcttttgataatgttaatgagaactcaagtccagaaaaaacagatgccacttcatccaccacctctccaccttcatatgatagtgtaacaaagccagacaaagagaaatatgaacaagacagaacagaaaaggaagacaaagggaaagacagcaaggaaagcaaaaaatagagcttcatttttgatatattgtttacagcctgtgaaagtgatttatttgtgttaataaaactcttttgaggaagtctatgccaaaatcctttttatcaaaatattctcgaaggcagtgcagtcactaactctgatttcctaagaaaggtgggcagcattagcagatggttatttttgcactgatgattctttaagaatcgtaagagaactctgtaggaattattgattatagcatacaaaagtgattcagttttttggtttttaataaatcagaagaccatgtagaaaacttttacatctgccttgtcatcttttcacaggattgtaattagtcttgtttcccatgtaaataaacaacacacgcatacagaaaaatctattatttatctattatttggaaatcaacaaaagtatttgccttggctttgcaatgaaatgcttgatagaagtaatggacattagttatgaatgtttagttaaaatgcattattagggagcttgactttttatcaatgtacagaggttattctatattttgaggtgcttaaatttattctacattgcatcagaaccaatttatatgtgcctataaaatgccatgggattaaaaatatatgtaggctattcatttctacaaatgtttttcattcatcttgactcacatgccaacaaggataagacttacctttagagtattgtgtttcatagcctttcttctttcatatccctttttgttcatagaataaccacagaacttgaaaaattattctaagtacatattacactcctcaaaaaaaacaaagataactgagaaaaaagttattgacagaagttctatttgctattatttacatagcctaacatttgactgtgctgcccaaaatactgataatagtctcttaaactcttttgtcaaattttcctgctttcttatgcagtattgtttagtcatcctttcgctgtaagcaaagttgatgaaatccttcctgatatgcagttagttgtttgaccacggtacatacttgagcagataataacttgggcacagtatttattgcatcacttgtatacaatcccgtgtttggcaagctttcaaatcatgtaatatgacagactttacacagatatgtgtttagtatgaataaaaaagcattgaaatagggattcttgccaacttgctctcttgccaccaacttactttcctaaattatggaagtaatcttttttggatatacttcaatgtatacaatgaggaagatgtcaccttctccttaaaattctatgatgtgaaatatattttgcctcaatcaacacagtaccatgggcttctaatttatcaagcacatattcattttgcattagctgtagacatctagttttttgaaaacacctattaatagtaatttgaaaagaaataaccataatgctttttttcgtgagtttatttcaggaatatgagatctttcttctataaagttattcatgcacaggcaaaaattgagctacacaggtagaatgtagttttacttagaagatttttgtgggaggttttgaagcaaatatataaaacaactttcactaatttgctttccatatttaaaaaataataaattacatttatataataaatgtttaaagcacatattttttgttgttctggcaatttaaaaagaaagaggatttaaacgtacctatagaaacaaagatttatggttaaagaatgagatcagaagtctagaatgtttttaaattgtgatatattttacaacatccgttattactttgagacatttgtcctaatctacgtataaaactcaatctagggctaaagattctttataccatcttaggttcattcatcttaggctatttgaaccactttttaatttaatatgaaagacaccatgcagtgttttccgagactacatagatcattttatcacatacctaccaagcctgttggaaataggttttgataatttaagtagggacctatacaaaatatattacatttatcagatttttaaatacattcaattaagaatttaacatcaccttaaatttgaattcaatctaccgttatttcaaactcacaaatataactgcattatgaatacttacataatgtagtaagacaagatgtttgacaggttcgtgtgtaattttctattaatgtttttacattgccttgtttttatgtaaaataaaaaatatgggcaactggtttgttaacaacacaatttcttcttagcatttcaaaaatatatataaagttgttctttttcctatttcatgaactatgtttttttttaaaataacatggttaagttttatatatatttacgtttgtttcaggaatgtctacttgtgactttttatcaattaaaaataatatttggaagaaagagcttattaagtataagcttgaagtaaaattagacctctctttccatgtagattactgtttgtactgatggtttcacccttcagaaggcactgtcatattaatatttaaattttataatcgctgaacttattacacccaacaatacagaaaggcagttacactgaagaacttaacttagaataaaatggaagcaaacaggttttctaaaaacttttttaagtgaccaggtctcgctctgtcacccaggctagagtgcaatggcatgatcatagctctctgcagcctcaactctgggctcaagcaaccctcctgcctcagcctcccaagtagctaagactacaggtacatgccaccatgcctggctaatatttaaatttttgtagataaggggtcttgctatgttgcccaggctagtctcaaactcctggcttcaagtgttcctactgtcatgacctgccaacatgctggggttacaggcatgagccaccatgccccaaacaggtttgaacacaaatctttcggatgaaaattagagaacctaattttagctttttgatagttacctagtttgcaaaagatttgggtgacttgtgagctgtttttaaatgctgattgttgaacatcacaacccaaaatacttagcatgattttatagagttttgatagctttattaaaaagagtgaaaataaaatgcatatgtaaataaagcagttctaaatagctatttcagagaaatgttaatagaagtgctgaaagaagggccaactaaattaggatggccagggaattggcctgggtttaggacctatgtatgaaggccaccaattttttaaaaatatctgtggtttattatgttattatcttcttgaggaaaacaatcaagaattgcttcatgaaaataaataaatagccatgaatatcataaagctgtttacataggattctttacaaatttcatagatctatgaatgctcaaaatgtttgagtttgccataaattatattgtagttatattgtagttatacttgagactgacacattgtaatataatctaagaataaaagttatacaaaataaaattatgtttacacgtattttctgtttcagttagaataaccataggtgggtaaagtcagtggatatctaaataagttgcaacaactgatagctttttccttttcattgaaaggacagcttcaaatgtcctccataagaagtgttcccgggaaacaaagacaaggacaaagaatctagagttccaaagtaatttcttgaaatccacatcaaggtttgtgcaaagggagaaaattgagacaggaagcaaaaatatgcaaacatctagccacacagcgatgtctacatttttgtgtaatagcattaagaggtggtgtagcatacataatggctaagagctttggttcatggagactgcattgttcctgtatgacacagaagtagcctggattcttacatttttagtagcaaattggttgtcatactaactactattactactaatataaattcttgattctgtattgtcattgttctaatttctttgtgtagcttgtctcattctacccttacaaccacatggagtattactctttttctcattttacagatgggaaagctgtaccagctcttaagaggtgatatagcatacataatggctaagagcatgggttctaagactagaactatatttgtatcccagttaagccatgaccctatgagtttgctgaatacattctttaacctatatgggcctcaactttcttatctataaaatgaggagaagagtactacttcattatgtggttgtaatgatagaatgagacaagcttcatgaagaaattaaaacaatgactgaaaacacattgaaaatttatattagtagtaagagtagttagtatggcaattaatttgctactaaaaatgtaagaacccaggctacctctgtatcatacaggaacaatgcactcttcatgaatgttaaataatgacaatattttctctattttatatgggtaagtataactatagtgcccaaaagagttttatgcacccattggtaggtagtaaatatttagtgatgtggcatatacaccaaatatttcaaaatttagctacttttgagatttatgaattcaaacaacatattaaaatcaggaaatatgcacatttataaaggtctagcttatttccaaaaagtggaggtggttcttaccatttttagctgagtaattaatacaaccctctactttagctataagcatcaagtcctgttgatggtcattaggtaagatattctaaaaataattgccatactaggccattatttcaacttttatgttatcttaatagcatgtaaaaggtgtaaaatagtccttgggacttttgtactgatagttgcaatagccactctgcaaaatagaattataatcactgaataatactgtaatccatttcaacataagtgattgtgatacatgcaaattttttacaacaacaaagctaaattctttcacattgtagataatgctatgccataacccaagcaaaatgagctgcaggatacatggtaatctctctcaagggagggagaaattacatactagctagagcagaggggattttgctgcaatagtatttgatgcacacaggaaatgaaacatgaataattgatagttataaacaagcaatagagctcacatgctacacttagcttgactccctattactctgcgagccatacctacattaataattgatctgtctgcgaaaaggtaatttgaagagatttatgagacattggtaataactgcatcattgcactttagcttgaatctttttaaatatatctttagaaacaaaagataaaagcaatgcacaataagtatacagaaaatgttcagagcttgttaaaaattttgcaaatctagtagaactgagcaaaagttattcgtaagttgtaatatttgctggcatgacctagtttttattttatttcctacaaaacaatatgtcttcaagttagttcagtcatattctttctataaaaatataattcttctctaatataccatcataattcatttttatttttagtgatgtgtaaaatttagaatttatgggaaaattatatccagtgaatattaagaatacactcccattaaattactatttctaaatatgtgagaacataatctggatttgcatgtgctgctttaaacaaatacattcttttacttatggctggcccttcatctgaggagcctccagatttactctctttaaatatcttgtgtcttctactctgtacattgacaatatgttaaaatgtgctttctcctgttcttaggctactcttgagaactgctcatttttatatgagaaagaatgatatcttgctcatataagaaaaggatataaaccaactgtgatacactaattccttctaacagaacagaaaaaataagtggatggggttacatgtgtctttatacaaaacacagataactatacccaggctcctgcctcacaaaaattgtgagataatacatttgtattattttaagctgctaaatttgtgatcatttgttacaaaggatcaaacacaaatgcatgctcctgttttccaatgtaccatgttaaggtagaaatacagatgagcaacgctactagaaaggttattttatcaaaccacaatggctcatacagactgtggaggtaaaaagagagggacactggtgagacagtttggcacactgatctcgcccgcaaaagactgatgtagaaagcaaatgttaattgttatcttatcaaaaatttaaaggaggagattttcctccctgttgactatcctaatcgtgtttaccattcagtgcaccttattcttggcaaagcaccttacaaatttttacccagaagccaaagaaaatgggcaatcttaagtaattttctcaaagtcaaagagaatctgaagtatacttgtcccactcatgcctttaaaatgtaggccaagagaatctacagcaaatgtcttctaaaacgtttcatttggaacataaaaagtttctatgtcaatacatttaaggaagggtgcattatatatttcactcttagagtaacataattcactttagcatgttacatgcttgcagaagacatgagactcaggagtcagagataataatagattattacttaaagcaatagcaggagccagagtattatcatttttgtgttggtcttagaaagctggggctgtcataataatataccatagactgggtggctagaacaacagaaatttatttctaacagttcccgaggctgaggagtccaagattaaggcgccagccaatttcgttccccagtgagggctcatttcctggctggcagagggcagcattctcactgtgtcttcaaatggaggaggcagtgagctctggtctctcttcttttttctataggaatactaatctcatggtggaagatatatatatatatatatatatatatatgtatatatatatgtgtgtatatatatatatatacatatatatatatgtgtgtgtatatatatatatatatatatatatatatatatatgcattcagtcctccatatccatggtttctgatctgtggattcaaccaattctggatcagaaatagttggggaaaaaatccacaaagccccaaaaggcaaaacttgaattttccatatgctgagtactacattgaatccatacaaatgaagtgatgtgtaggtaattttaaactatataggaggatgtgtgtaggttataagcaaacactatgccatttgtataagagatttgagcatctgtggattttggtattctcagggagtccagaagccaatccccagcagatactaagggacaactgtatatcatggtaaataaattacatcttccttctcattgattagtaccaccattcatccagttttccaaactaatcctcttcattaaccctccgcatttattcaccaagaccagttcattctaccacctaatgtaatgtaaatacatcaacttctcttaatttccactgtcaacacctaatccaatccattaccacctttaacctctttataagacaatgtaataacctacttgttttatcttactaaatccattcttgcctcacttccaaatctattctcagtacagtagccagagtggattttatgaggttgtgacatttccctgcttaaaattttgggtcattttccggcataaaattctgtaatatttctccattattatgatgataaattctaaaatcctcagcaaagattttacaaactctatactattactgtctacaagttctacaagctttccagccctacaccatgtcagcctcactgctcttatcttccctctttccctatcttaatctgtgtgcttcagcctcaatagttttctttctgtttgcaggatcttctcaacaaaagtatagtgtattcttacattcttatacagtgccagtgctttctggcctgagagagactatacatgtctttcacatggtaagttgagtggatgtttgaaactgtcccactgctcacaaaataaaattagtatagaaaactggcatttttgaaggactaagttaaaagtgtttttcctctatagctttaacaaagtagaaaaaaaacagagataatgtcaagtaggaaataaagactgaaaaatgaaaactttcatatacattctacattaaaatcagacatttatttctctaaggcctgagtttctcaatattggcaatcttgatatttgagctggataattctttgttgtgagtggctgtcctgtgcatggtgggatgtttagcacgatcactggtctctaacctctagatatcaataaacattcctaattccacagttatgacaaataaaaatgtccccatctttgctaaatgttctcagggggacaaaatcttccccagttgacaacgactgatctctgacaatgtctataaaagtatgaatcatggataaccgacattaccttagctattagtttaaaaaatactgagacttacccaagatctattgaattggatagagccccaaaataatcacatagcaacagtgaagaccattaccccaaaaatgactaactagttgtcctagggatattaagtactcttgattttctcttttaaaatattgctgcaaattcaaaatgatgtctttcggtgagaaattgagtcaattatctttaagttcaggtgtttctttttggctactaggtaagctttgggtacattcagacatgatatttcttcctattgttattcaagagtttgggttgccattcttatcataattacatggagcagtcacagagatgggatcacttgttcaagtggagtttcttcgacacgctaagtgttagtgcattgttacaatttgcattttgaaacaaagaacgtttttccaagaaaaataattcagacataatatttcaggtcagctttttcagatcatatcctgaatgaataataagtgggactttatttcattacattcatttcattacatttaagttttctcatgctgctagttgaaaaaaaattgtaactttctcctcaactttctctgaatagaattttatattaagcataggcccaccaagcagacatcccttaaactgagtgtgctgtgattcaaaacaagtcagaggaaattctacattggagaaggaggcagataaaagttttctagggcctgagacttacacaattctctaattcagatgtactctcctctagaaatttgtttcaataatatataaggtgtttttccagagaaacatcactcatcaactaactttttttattcttaatagttatttgatttctcactcccttaagtgtattttttttaaatattaaaatacttcctgtgtccatgtgttctcattgttcaattcccacctatgagtgagaacatgcggtgtttggttttttgtccttgccatagtttgctgagaattatggtttccagcttcatccatgtccctacaaaggacatgagctcatccttttttatgctgcatagtattccatggtgtatatgtgccacattttcttaatccagtctatggtggggggaggggggagggatagcattaggagatatgttaaatgactagttaatgggtgcagcacaccaacattgcacatgtatacatatgtaactaacctgcacgttgtgcacatgtaccctaaaacttaaagtacaattaaaaaaaatttaaaaaaaaatactcatcttgttttaatatttctggccaaagacaatgaatgagacaaggattaaaatttacgttaaaatataagtgtatgcttctgactgaagatagtttattataattttctgtgatgctcttctcattttgagaaattatgagctaacaaaattttatggatgaaaagaaagtatgaaatgccacagaaaatatctttttctcttaaaaaaatcctgtaaagtttacaactgccaaacttctaaatatcaaatctaattttgactccctctaaaaaataataaagataaaattgtaacacctgaacaactcagctcatcttgatatattgattcttgtccacgaccttaatagaatcagtctgataaagctctgataaaagacgaggaggaggaaacagaagtgggaaaagaattcttccatgcttcattttctgcccaatttattttcttttatttactcatcctaatcacctcatttctatcttaaattcagaacaaagattaataaatggtttagagtcacctaatttggcctggtgcttgcaattaaaagatatgcttatctctaaagaatcatgcattgtccatttattttaaagacaagtaggtctgccccctacaagcctcagccagaatactacttagagcagcgttataggcaaaaaggaatccggaagggagccaggaaaaataagagaagcaattgacttcagcttcgtgacactgagctggagcactttgatgtgcacaaagctgaggaaccattctggcagcttcaaatggtagccttcagcatttttcccctattgcatttcttcctgtcaagttatttcctcctagtgtaagagaacttcctccctgcttctgtctccttgggacctaaagtcaacaaaactaatctcttcctttttatgagatcaataaagcaaattagacatgatattgaaagtacttaaaaatttaagccctgctttttggaatgcaatcttttgtctttaggaattgttaaaaaatgtcaatatacaaacatatacatagcagtatctttttatataatatcaagaatgggggaactagagaaggaaaaagaaccaagacacaaagacaatatttagtaaaatgacaaacataaatgctaacttagtgcattgggatgtcagtctttttcttattttttgagttattcatcagagaaatgcaagttaaaatagtaatgaaatattgctagaccaccaccagaataactaaattaaaaaaaaaaaactgacaataagtgttttcaaagatgtggagcaaaagaaactctcacatattcctggtaagaatatatacctggacaactactttgaagatatgtttgtcagtatctattaatgctagccatatatattcatgaccagaaattctatcactggtatatatgcacagaaaggagtatttatagtcatcaaaaacatgtatgtgaatgttcacagatgatatattcattatggtctcaaactggcaacaatccaaacatccatcaagattagaaagaataaatattgaggtataggtatacaacaagggaatccaggcttgtgcctataatcccagctgctcagaaggctgaggcaagaggattgcttgagcccaggagtttgaagctgcagttagctatgatcatgccactgcactccagcctgagtgacagaatgtgatcctagctctttatttttttaattcattaatttgtttatttattttaagacagagtctcactctgttgcccagactggagtgcagtggcaatatctccactcactgcaacctccgcctcccgggttcaagcaattctcctgcctcagcctcctgaatagcttggactacaggcacacaccaccacgcctggctaattttttttttttttttaagtagagatggggtttcaccatgttgcctaggctggttgcgaactcctgagctcaggcaatccgcctgcctcggcctcccaaagtgctgggattacaggtgtgagccaccacgccgggccgtgatcctagctcttaagaaaactggtatacaacagtaagaaaagacattttactgatacacgtaaaacatgcaaaaacatagggaatctcacaaacataattatgagcaaaagaagccagacacaaaagattacatattgtttgaattaatttatgaagcttaatgacaggcaggcaaaataagtatttatgctaatagaagagtggtaactttgggggagttattggcatagaggggcataagggacaattcttaggtaataggaatgttttgtatcctaacctaggtagtgtttatttaggagtataaatatgtatatttgaactgtacaattttcttaatgtactatgtacttattatatcccaataaagtaataaacaacaataacaaacaaactcctgagttactgaaatcagccaccatccccagggagttacagctataatgtcatcttaccactctgtttcttgcttctcttttgcttttttgttcctggaaattttctttaatttttataagctcagctttgcactcgtaaaattatttattaaattttacccaacaaacagtttatcaggacttttttcaggatacttgaacacctaattgttaggtactaaatgtacactaaatgatctcctggctaggaatctcctatagctttgcttgagagtcataaaaactaagatcattttaataaaatttaggcttccaaaatattttcttcttcttttctagagcctcccagagcaaaactatgaaagacaaaaaaaagtagcagggaaacagaaaataaatattcaaaaagattcattaaacctgagacctaagtttgcaaacttagataatgttttaattattttatgtaagactaatttatttgctaatctaattgaaacattattttcctactgcattgtaattgcattttaccaacaatacaacaccatcagagaacttaaatacaccacaaatgcattaatcatttatatttggagacatggcttgaaacaggatgcactatgaacagctttattttttctaacttgcaataagtctaaacatttttctttcccttattgcttagatagctcatttcctttatgacttacctcagactagaaattaactgatgggcatagtatctacactgtttctaaaactaatattttatgtatatatatatgcacattcttgttttcttcccttacataaacatcgaatccatcaacaaacgctactgattcaacctgtaaaatatatcccaaatctacccttttctattcatctagaccacctgcccccttgtccaagccactattatatcttttacctacactatcgtagtagccacttaactggtcttttggctccacttttgactttctaaaatgtattcttcacagagtgatcagagtgatcctttaaaactctattggacaaaaaaccaaacaccgcatgttctcactcctaggtgggaattgaacaatgagaacacatggacacaggaaggggaacatcacacaccgggacctgttatggggtggggggaggggggagggatagcattaggagacatacgtaatgttaaatgacgagttaatgggtgcagcacaccaacatggcacatgtatatatacataacaaacctgcacattgtgcacatgtaccctaaaacttaaagtataataataataaaaaaaaaaaactccattggcgatcaggctactgtctccatgaccaccagtgcttcttaccgtgttcagaactcccagttgcacctagcataaaaagccgacttcactctctaaagggctttacgtgatctgttccctgcttgactgtgctgctgctccatgtaacaccaacctcttcttaaactcacagtgcctcagctctactaacctgctttctgttcttgaaaacaagtttattcttgcctcagggcctttctcttgctctttgtcacctggaatgttctctgattcagaacacagctgcatccttttagatttcagttgaaatatttccttattagagaagcctttcctggtgagcctacttaaagcaattccactgccctgctcactgtttaccaaattaaactgttttactttcatctaccatttactattatctaaaattatggaaagttgattatgtgtttatttgtctcctctgcattgataaatgttaccccatgagctacagacattgtttgctttagctatcttcatccctagatggccttacagccaacagatcctcattagttaaattgtgtttttcagatccctgaactcagtcagtttggcttagaaggaaaacctctgatgaactaatctcacaaaaaatgtcagtgtctgctcataattgagtgtcaccttttccgtgagtctgggaatttgagagaaattctgagaatacataatagatacatggtaagagagtgatctcaggaagggctttcctggagcccttctgtgacgtcctcccatttgggctatgctttgctacttttgtttcatgagagaaaaacaaattaccttctaaaatctacccatcaacagataaccacgaaagaaatgtctaccaatggtgtactggtaaatgtaaagcaactggctctcctggaggataagaccttttctctatgtatcttttgcctatttctgtggtgtaaacactcatcccatggctaaattccagcaaacaatctgaagtcactgaacatagacttggaaggagccgtgcaccattgctctctccagctggcccaagaaggctccagcacaccactgacatctactaggtgccaagaataatgggaggtattttatgttcaggctctcctatcttagcacaatgctaaaaactaatttgtcagttatctgtgagagatgaggaaataaacttgggtaacatgctcagatacacatcacaaaaggggtaaaatcaaggttcaaattcagatctgactccagataccacatctttcatttgtttcagggagtagtagtaaaaaaaaccaccaaaaacaaagcaacaaacaagagtattgtcagtgtcaagctgctttgtaagatcatagttactttccgaacatcctagatgtctcacagatgatgcaaattttatttttagtgttaactatatgtgtagtacataattagttggaatgagaattctaaaagttcagtgcaccaacaaagtcttggaaatgctctctcctcttttttcccttctttgctaattccctttttcgacaccctcctaaaacacgaaagttttagacatcaaggggaccagccattgaaagaaaaagtgacccaatatcaaacagcttgtgcctatttgtttagaaattctggtgaaaaacaaaagctagatcagtttccaggataaaactgtcaatgaagtaataaagttccatgcctttggaagatggtgtcacttccacctgacagcaataaaaaggaggaggaggagaatggtcccaggtgagaccattaattctcaaacatttgcacacattagaatcagctggagaactttaacacacagaatgctggcatgtaccccaggggttctgattcagattcaataaatatacagtggggctcaaaatttgcatttctaactaacaatctccaggtaatgctgaggctttttgtctagtaaccacacttaggaggggctctctagatgccaaggatttgtatatgcatgacaactgagaaaatgctggttaagagccctgtttctcaaactttactgcatgttacaatcacctggagaccttaaaacccatgcctgtgtctcttcccatagatactacttaaattaatctggggtgtagctgagtgtattgaaatttttagaagctccaggggtgattgtaatgagcagctaagtttgataacccatggaaattgctctaatttttttgtctttttcaacttttattttagattctgagggcacaaagttttgttacaaaggtatattttgtgatgctgaagtttagagtacgattgaacctgtcaccagaagtgaactgtgcttgctagggatctagattgcatggtccatataagactctaatgcctgatgatctgttactgtctcccatcatccccagataggacctctggttgcaggcaaacaagctgagggctctcactgaatctacattatggtgagttatataattatttcactatgtattagaatgtaataataatagaaataaggtgcacaataaatataatgtgtttcccatcatcccaaaaccatacccacctccccagtccatggaaagattaccttccactaaaccggttcctggagccaaagaggttgggggccactgttgtatagtatctcacaggcgttctctggatgtcttgaatttgcatatcagcctgtagtgattgcggaaaattttgtgaactacatcctcaaatgtgttttccaagttgcttacactctccttttctttcagaaatgccaatgagtcacaggtttggtctctttacaaaatcccatatttctcagaggttttgttaacttttgaaattctttttttttttctttgtttttgtctgactgggtttatttgaaggacaagtcttcaggatctgacattctttcctcatgttggtctattaggttgttaatagttccaagtatattataaaattcctgtagtaagtttttcaattccagaaattccgtttggttctttcttaaaatggttatatcatctttccactcttggaatgttttacttgcttccttggattgtgtttcagcgtctccagaatctcgttgaccttctttgccatccagattctgaattctgtatctgtcagggctggtgttcctatagcttttggaagttgctgtcacttagacaaagcttttgtttttatattatatccctagagggtttgactttggtttatgttgagtatgatctactgtcttcattttttttttttttttttttgtactttcaaaggccgaggctctgtgcctgatctttttttttgtggctagattcctgcattggatttcaccagcaatgtgcactgggagaatttttatttggtggtgtaatccaggcttgatccagtagatggcgacggcgcgtaatattaatagtaagggctggcagataggctcttaggcgctcacctgttttgtatttcagtgcatttgcagcggtactctcgggtgtgggagatgggggaggcacgagatgaccctgtcaccaagtccatgggccttgcggggaccccctccaatcattgggcggcactagcctttccttagcccgaggggccctggttgcctgcacttctccgttccttaggggtggccctaacccatggttgttaggttgttatgatccagctccctggatctcatagcaacctaacaaccttaggtgcccactggtcccctgtactttgcagagtcagggcagtttgtaggatacatctgtggtttatgttttgatgcagtgggtcaaaggtggaggatccctgggtagggcaggattgccatggttgtgcaaccggtgtggcccccatggcccagggttctttgcccagcagacagttgtggggtctgcgcagctcacgctcccccaaccaggtctctttccggggtctgccccagtagctggaccaaaccagctagttttgtcccaagcattctgcacccggatcactgggttaattgttcccatctgtggggctccctcaggcagagctcgcaagcaggctacacccttcccgggctggtcttgtggagggaggcacacccagctccggcgccggcccttgagcatatatgcctctctcagtgctctgagagtgggggctcctcctccgcttgagcttcagcgacagatttcagctccatattccttagctgtgtgctcaaatgtttgggtattgggaccaggcccattgatcgccagggttgatttggctgatctcgctggctaggcaggtgtccccttcctccttcaccgccccaggtgcgaacctcccaaagctgcccgctctgccgaagaggatgaccatctccaacagaaggatagaggagaaccagtcttcggtcaaggatatacaagtagctgcgctcccctgctaggacctccaaacaagctttccaatgcctgtaggggtcgtgggatctcttgtagctaggatttcagaggtcagtggcgggagtgttctttcacttccttaggacctggaagcctagaacacttaggacctggaagtgttctttcacttccttaggacctggtcctttcacttcattaggaccagttaagggctgggagccggttctgacatttggcaactccgtgcagggtcccagcttcctccctcttccacctcgttgtctgcatcgcctctctatttactttcagtgttttctctcaaaagatctgttcaaagtgcgatggcttatttcatattttgatttctcttgctgggagcgtagcttcccggctcaatctagttggccatcttctcccctctagttggccatattctcccctcaatccgctctggattttaattcataggttctatattctttacacataactttcaatgtgtcctcctaaaacttacccatccagaaagcactcatttccttaagttgctagttcgtttcaagcatgtgctgaactgtagaagttagagtgccagctgagaaatccagtagacagtgcctctatgagtttctcctctatgtcagtgcctctatgagtttctcctctatgtcagtgcctctttgggtctcagtctctgctacttactgactgtgtgatcttagttaaatatgacatttaacttctttgttttgtctcctgttgtaggtaagtatagattattatgagcagtatatgaaagaacttggaaaatgcttggaaacgctcaaaaggtcatagagaagaattattattaatgtataggaagatggtgtttatagatggtacataatagattattttttaattagagcacctctcattgtcaaaatacagtcccagattacctgttatacgagaatcccaaataatattgttaaagagtagcagctcatatgccacctgcttgataaagttttccagggtccaaagtaaccaatgtgattataattctacagtataaacatgcaacagcttattctattattaccttacgggtatctctcctaatataattcactcattgaggacagaagcaatgaatcctctatgaatatgctcacttatgtaggtgctaattgcctaaaaatatattacttctctgcatatgtgaggataaaatattacttctttttcattgttaaaagcaaaaagatactcagactactctgattccataagatgttttaaaataattatttagtaaaaagagaaacgtagtttttttggggatgtaagtttttaaaattctttatataatggctccatcttctggccattgaaatagacttaccatgttacaaaatgcagttaagtctcatactgcagaaataaatcagtacgagtcaaaaagaataacataactttttattcagaaactttcacaaacttgactaacttcttcactgagaattttactttggtcattgtttaaatttcatgtgtctgaatccttctcctcaccccgaattgttaggacacattttaacaatgtttggttttctggggatttattttatattgacacaatacttacacagtacaggtatctgtacttaaaagaacagtgagagaagccaagtcaggaacatctcagtaaacacatttaagttccatggacctcactgtaaaaggccacctgtaggattgttgaagagaaacggatctactctgcgggtagtctctccactttgttcactgtttcctttgctgtgcagttttttttttagcttgatgtgatcccatttgtccgtctttgatttggttgcctgttcttgtggggtattcctcaagaaatctttgcccgtaccaaagtcttggagagtttccttaacgttttcttgtagcagttccatagcttgaattcatatatttaattatttaattgattttaatttgatttttagatatagtgaagaataggggtctagttttatttgtctgcatatagatatccagttttctcaacaccgtctattgaagagactgccttttccacattgcatgttcttggcacctttatcgaaaatgagtttactgtaggtgtgtgtatttggttctgagctctctattctgcaaactacccatctaacaagggattaataatcagaatatacaaggaacttaaatatctctgtttgaaaaagtctaataaactgaataaaaaatagacaaaatatttgaatagaaatttctcaaaagaagacatacaaatgacaaacaggtacatgaaaatgtactcaacatcactgatcatcagaaaactgcaaatcaaaaactgcaatgagatgatatctcaccccagttaaaatggcttacatccaaaagacaggcaataacaaatgttagctgtggagaaaaggacaccttcatacactgttggtgggaatgtaaattagtacaatcactatggagaaccatttgaaaattcctcagaaaactaaaaataaagctaccatacgatccagcaaccccactgttgggtatacatgcaaaagaaagaaaattaatatatcaaagagatacctgcactcccatgtttgctacagctctgttcacaatagccatgatttggaagcaacccaaatgtctttaaacagataaatggattaagaaagtatgattcttatacacaaaggggtactcttcagccacaaaaaaaaaagagaatgaattcagtcatttgcagcaacatggatggaactggaggtcattatgttaaatgaataagccaggcacagaaagacaaacatccatgttgtcacttatttgtgggatataaaaatgaaaactactgtacccacgaagtttgagagtagaaggatggttactagaggctgggaaggacagtggggagtgaggagtctgaggggaagagacaaatagttaaaatgaatgaataagacctagtgtttgatagcacaacagggtgactgtagtcaataataatttaattgtacattttaaaataactaaaagaatgtgattagattgtttgtaacacaaaggatatatgctcgaggagttggataacccatctgccatgatgtgataattatgcattgtatgtctgtatcagaacatctcatgtactgcataaatatatatacttactatgtcctcacaaaaattaaaaatggaaaatataagaaattgatctagaaagtatgtaactgtcaacaggaaggaacgtgctatatgacagtaggtaagtcttaaattgtgatttggcttccaaagatatgagaggcggccagcccacagctctggactcctgcgacctcatgggttgcacactcagcttgtaggtggctcattgtgtgtgtgcccagaatgaaaaaggctgtgaggagctgcatcttctcactcacttgtatctgtatcagctttctatcctttatactgtttgttgctggtttgatataaactaaagttagagcatccatgaatcaaatctcagtacaggttcactagtctttgatcacaaaccagtccgctgcagtctggccagctcaggcatgcttcttaaacacattacaccaggccagacaaagcatactagtcatttcaaagggatctgaattgcctatttggagaacatattgcagtgcagaaacacacatttccataatgtctattgttattcccttaatgtcaaccattaattctacagattgcaagcataacatgttctctgttgaaatttgaaaaacacagaaacccaaaaagaagaaaaaaatgaagtcatattcccttgagaaaaaaaaggattgcatttccttccagtcatttttttttctatgtagataaatttgatgtttgtgttttcatgtggtctggttagggttgtggtgtaatacagtaacctaaaagaatttatttattaaaactgtcagctgtcagttagctcagtgctatatttggttcatcttacagatatctctctttctctctctgtctctctctctctctgtctctctctctctgtctctcgctcgctctatcagcagcgaaggcattgatgttgattaaagagtcccattcccagggccagatatggatgcggtgtatgctattttatttatttcactgggcaaacagaacaataaagctggcttttgcatgctgcttcttagcagtaccaaagataaaaccattagatggtcctacttccaaatgtcaattctgctggagaagacactcctaaacaaaatgtatacagaaaacctcaatcacaaacatttattaaaacagctctctggtcctaagggcaggcccccatgagattcaaagttccatcctaagctacctcacatttatgtactcttcatatgatcataattagaataagtgtatgtatatgtttttgaaaatatttcccaaaagggggttgaaaatatttctatgtattttaagcacttttcatcttttaaaaaatcttataagttcatgtatatgtaaatccatttaaaatatctagaaacatatataccatatactaatatgtctaggtggtaggattggctattttttttctaattttttatacttttatgaatttcatttttgtctaaactttttaaaattaaactaattatgagttgcttttatcagcagagaaaggagatatactctagcttatcaaaaaaaaaaaaagaaagaaagaaaaagaaaaaactttacaggattacattaaacaaaccagaccatctcccctggacattatgcccatgcacccaaaagtgggaggtggaagatgagagtgatgatgacaatacagggaggggcacacccaggcctgtctctattgtgtaaggcttatttgccaactctcccctgttcaggatcaatggaaaattatatggcatttgtctttctgtatatggcagcaacatgaacactatcttattttccaaggctcacttcagtgatttgtgtaccttccttgccttaataaatggatcttgaaaagctttaattaaaactacaaaataactagcttcagaatagttactggtaatttattctatgtaagcacagcacaataaaaaccatttggggctcttaagaacattagtatgcctttgactgtcagtcatttattttcatcctcattgtcactatctcagccaaggtcctcatctcttcctatctaggttgttgcaagagcttcctgttttcaatctatttgccataacatttccaaatgaatctttctaaagcccaatgttcatatagatggtgctgattaaagacattgactatgctcccattacctacagaatgaaaaccagacatcatttgggtgctagactcataaactaactctaaccctgttttattattttaatcctctgctattcccccattccatcctgtcactccaatcagtcagagctgctcccctgaatgtattatatacttttatgcatctaccctctggcttatgcagttttccctttactttatcactctgaagtgtctttccctcagtctacccaagtcctcccagttatctgagtacagcccttggagactgtcaaggagagaagcttggcatgtgcccagaagatgctgctcaaaaaagagaggagccaattatttcaggagaggagccagtgagaagggcattactaggaggacactccaaaatcaatattgcaagaagaaggcaattcttaacttgcagctaaagtgggaggattaagaactctgagatttgataaaatgacttaccaaatcagacaatctgagcaagtcagaaagcaaatgtgagagtttagttggtggatgaagaaaaaattaaatgaggtatcactttgtcatcagaaaggccagttcaagggtattgttataatattatgtaccctttagagctgtccccttcttgtggtttggcatcctttgcaggactgggggatactcactggaaaccttatccttttgggcctagtttaatccaatctcctctaggctgctatgaaacttttccagataactttagcacacgggtgtcatagctccctctgacatcacagcatctgttatctctagccttcatttggcaatggatcatatgatggcctatgattgttttttgcatttttgtactataatttataaggacatacattttatttaactttctacagttgtgtctaatactttcttcagtatggagatttatctcttttatcacataatatctccctcttaatcaaacataaaaatatactctttatgggcacccaaaatatttatttatcatttatttatttatttatatttttaaactcctcttaccatcattctcaacaacaaaaattatttattgcatgaccagaaatatgttctgttaattcactcttctctttaagtaggcctaaaatctaagttggcagttccgtctgtgaaaccatctctgaaaactgtcaaaaattaccccaaagtgctcattcataaataattatattgaataaattccataaagaatatatatgcagttcagagttacattcaagaaagcatatatttaagcttggataatttggatatgaacaataaaaatcaactctgacttgcttaagcagaaaataatgtactgcaagaatattttgtagttcaaaattcatgggagagctaaagaagatgactcagaaaaaaaaaaaagataaaaacaaggctgtaaagattccaggtagcagaccagtttgagtgccaccacttttttccttgtattcactctgctcaagttcttagtcttcagagagaaaaaaaaaaaatcaaggtggccccacctgagttgttttctcttcccctcaggcagcagagagcaagacatcttgactatacaaaaatgagaagaagtaattttcccaaagtaaatctggcactcatcaaaaggggaataatggaaacaaggcttccaaagaaggcacaacaggaagaactgatgtaaattatagtccaattcatatatctgtgaggttttatggatcagtgttcattctggtgaatgaatcctatcatcagtttagaaataaagcaggtggaatgagcatagggcgaagggtttatttaaaattggaatactctactgaggctttaaggtagatgtaggcagctccatagtatagatatgaccttttgggcagaaggcacaatcaagtcaattatgaatgcggagtgggcagtttgccaggtgaggatgcctccaggatccaagcctcactgtctacttagattctcctctgaggtcacattggtaattattcctactggttcacattgaatgagagctttgtatggggaaggtaagtgttttacagtgtagatgggaaaaagtcaaattaataaaatatagcaatgctgtaactaacataaatccctaatgcccagagttggtgaaaccaagtggcatgtgggttacacagaaatgtactcaaggatacaggcactgggtgatataaagctgcacagttatgcatcaggcatctctaagcaaatcctaagtacttaaaaatggttgtttttaaaattcagtatctagatatactaataaatctacaaaacatttgccaactgattttacttcgggaaaagaataataccttaagactaagaataaataaagcagaatttgatcatataaagtttttacaaagaataatttatctgcagtatgtatttctcatgcttgcattacttttcactgcttctattattttaaaggatagtaagtatgaagcttactctgcaagaaaattctaattattctactcttagcagtggggcccaaaattctcgtgtcttcttggagacagagaaaagttattgagaaagtaagattattttagagtgaggagagctagtctcagtatttacatattttaaagaataattgtggttgcatatgctgctcagaactgagcaagataatttatcttactagtgagtataataaacctaggccaaaaaatttaagattactagaacatgaagtgaagaccaaaaatatcagtacttttttttctttgtaggggaaacaaagtcagaaaacagtgagcatttgctcaattttttaaataaacacaagaaacaagaagataataaataagtcccatttttataggtaaatatggtacttcagttagagaacagacatcattaaactggttgatcagaaatctttaaatccctaattaaatatctggaacttgacttctaaaaatgatatttgtacctgttaatttattgttgtggagtgatcaaatgtgtatgaaattattttactttgtggagcaaagggactaaagaataagactagggagtttttatttttatggtactccaaggattaaatagaaagatggatccatatctgtctttccttcctaccaactagctgtgatataaaaggaaatttaaaagtagtgctctactgcaaagtgaagctcactacagtcagagtacactaaagaaaagtaaaaatacaaagcaattaagacatctgaacattatgccttctccaaaacaactacatttaaatgttttcttcagtgcacacagaacatgtccaatatcttatacttatttcccctccatcaaggcagcattggagactcaagacaaaaacattggtaaaagcattttcacatgtcccaaaatcattgtttaacatggatattgccatcagcagacattgaagcaattaaaaccaatttaaacatgaccaggaagtggtagcattggactgaagggcacactaaagtgtcttaattccatttgcagatattaaaccaatatgaaggctagtaattttactgactctctatagagcaccttcttccacagaaaaataaaggaaacattataaagaagttttgtagtgatggtttcacaataaaaaaattatttctactaaggagaatgttcttatagcaaattcccatggcaatgaactgggaactgggatatatataattctattttgtgttacttttaagggtgcatgaaagttctgtatgttttgggagagtggcaagcaaataagttagaagaaactaaaatgttaatgtagcttccaaagctattaataattttgatcactgacctgaattcctgtttcctggaagtgcttcctagagaccgcagtctccctgacttctttgtcgctggtggctagagtccctatttcatgcaaagattccaaatcctaggcagggaccatcactcagtctcagttgtcagtacctcttgatttactgtctgatgatgtcaagttcctgataaaagcaatggggaagaaagatcttttagatgacggtggagcaattaacttgatgaaattgctttggggaaactcagtcttatgttacagagaaatatatcaagtatttgcttccaagaaaacctgaaccaggattatctcaacttgaggattttcactagacatagaaaacactgaccacaaaatgtaaaagtactaatgcattttgaaattccagaaagatttgtatgtgcattttaaaaaggttatcaacaagcaaaacaatgtgagatttttaagcagtgaacagttagttcttcctaagggtcttcttactacttagcccatttttccccaaataaatagctgaatattatttagttttgtgatgcagcacacttcttaaggaagggtttcattagcgtttctttatctttcactggattcagattaaagctgtgtgaggtttcagaataacatttctaagatgaaagaactttaaaaggaaattacaaaataccagtgctaccttaaccaatagagacaagtatatattcagcggctggtgcatgcagggcactgttccaggtgttgtacaaaactcaaataatgcccacctgcccagagtgtacattctagtgtctgtatgctgggtgaggaaacaaaagccatgtccgaatacttaaaaagctaaacaaatagatgaacaatataatttcagatagcagtaaattctaggatgaaaggaagccagggtactacaagaagaaatgaccataaggaacaggatgggagagggttaaattggattggtttgctagggaaaaaccttgctgaggatgtcatatctaatgtaaggctgaaatgaccacaaaaatgagtcatttcaagacccagagtctgagcactgcagacaaaaggaacagtatgtgcaaatctcttcagatggaaatgaacgccacccattggaggaaagaaaacctggtgtgaatggggggaaataagatcagaggcaagcaggggctagattgcatgggctttgataaggggcttgagttttttctggacgtattaagcagtgcaatggcatacttgaatttactttttttaaaatgtcaacttttattttgaatacagaggtacaaatgcaggtttgttacatgggtatattgcattccagtagcgagcataatacccaataggtactttttcaatccacctccctttctcccgactctactagtccactatgtctattgttcccatgtttatgtccatgtgtgcttaatgtttagctctaacttataagcgagaacatgccttatttgattttctgttcctgcattaatttgcttaggatcgtgacctccagctccatccatgctgcttcaaaggaaatgattttattattttttatggctgcatggtattccatggtgtacatgtaccacattttctttattcaatccaccactgatggacccctaggttgattccatgtctttgctattataaatagtgtggcgatgaacatgagtgcatgtacttctaatgatctaatgatctgttttcctttgagtatatactcagcaatgggatttctgagtcaaatggtagcatactgttttaagttctttgagaaatatccaaactgcttttcatagtgaactaatttacattcccaccaatagtgtataagcattcccttttctccacagactcaacagcatgtgttgttttttgactttttaataatatccattctgactggtgtgagatggtatctcattgtggttttcatttgcttttctctgatgattagtgatcatgagcattttttcacgtttgttagccacttatatgtcttctcttgagaagtgtctgttcatctattttgcccactttttaatggggttaatttttgcctgttgattgatttaagttccttatagattctggatgttagaccttggtctgatgcacagtttgtgcctattttctaccattctgtaggttgtttgtttattctgttggtagtttcttttgctgtgcagaaactctttaattaggtcccactcgtcaagttctgtttttgttgcaattgctttcgtgaacttaatcataaattcttcaccaaggctgatgtcaggaagggcattttctaggttttcttctaggattttttataattttagtcttacatttaaatcttcaaccgctattgtgttaatttttgtatgtggtgaaaggtaagtgtccagtttcattcttctgcatatgactagccagttagcccagcaccatttattgcatagagagtttttcccccattgcttgttctcatttttgttggaccttgttcaggatcacatggttgtaggtgtgttgctttatttctgagttttatattctgttccattggtctatatatctgtttttgtccagtaccgtgctgttttgattacttatggtagccttatagtatagtttgaagttggctagtgtgatgcctctggctttgttctttttgctttgtattgctttggctaatttggctcttttttggtttcgtatgaattttagagtcttttttttctaattatgtgaagaatgacattgttaatttgataggaataatgttgaatctttaaatttatttgggcagtatgggcattttaacaatattaatttttctaatccatgagcatggaacatttttccatttatttctgtcatcactgatttcttccagcagtgttttgtagttctccttgtagagctcttttacctccttggctagctgtcttcccacttatttcattttttttgtggctattataaatgggattgtgttcctggtttggctctcagcctgtgtgttattggggtatagaaatgctactgatattgatttggtatattgaaaccctgctaaaatcatttatcatttctagtagccttttgttagagtctttagggttttctgcatatagaatcattttcagtaaaaaaaagatggttttactttttttcctctatggatgccttaatttaaacttttaacgaattattctgattgccagctggagtaggagcaggacaagtgtagaagcagtgattgaaattaggatgcttttgtctagacaagagatgatagggatttggactagggtgttaaaatagaagaagaggtaatatggcagagatgttgagaccaaaattatagtttggaaatgagtaaaatacctatttcataagcttccttcaatacatttccatattcaaacatttgttgaatgtctactaagttctggttttgtacttgagagataccacagt

SEQ ID NO: 2 - DNA, 8025 bp, synthetic construct
  source 1..8025: mol_type = other DNA
cgaacgaccgagcgcagcgagtcagtgagcgaggaagcggaagagcgcccaatacgcaaaccgcctctccccgcgcgttggccgattcattaatgcagctggcacgacaggtttcccgactggaaagcgggcagtgagcgcaacgcaattaatgtgagttagctcactcattaggcaccccaggctttacactttatgcttccggctcgtatgttgtgtggaattgtgagcggataacaatttcacacaggaaacagctatgaccatgattacgccaagcttggtaccgagctcggatccactagtaacggccgccagtgtgctggaattcgcccttttcctgcaggtcccacctgcacagatatgcaaagcagaaaccctcgtgcaggcccgaaagagaaagcgaaccagtatcgagaaccgagtgagaggcaacctggagaatttgttcctgcagtgcccgaaacccacactgcagcagatcagccacatcgcccagcagcttgggctcgagaaggatgtgagtgccatgtctctctgcgggctccatctctttcccctgtcaccacctcgctttccctagctctggctcctccaactgctctagggctgttggctttggacagaatgtccaagcagtcaggcctgtctcagctcattctctaatgtcctcctctaactgctctagggctgttggctttggatagaatgtccaagcagagtcaggcccgtctcagctcattgtctaatgtcattctcctttctgtcattcacttgcaggtggtccgagtgtggttctgtaaccggcgccagaagggcaagcgatcaagcagcgactatgcacaacgagaggattttgaggctgctgggtctcctttctcagggggaccagtgtcctttcctctggccccagggccccattttggtaccccaggctatgggagccctcacttcactgcactgtactcctcggtccctttccctgagggggaagcctttccccctgtctccgtcaccactctgggctctcccatgcattcaaacgctagcgccactaacttctccctgttgaaacaagcaggggatgtcgaagagaatcccgggccaatggtgagcaagggcgaggagctgttcaccggggtggtgcccatcctggtcgagctggacggcgacgtaaacggccacaagttcagcgtgtccggcgagggcgagggcgatgccacctacggcaagctgaccctgaagttcatctgcaccaccggcaagctgcccgtgccctggcccaccctcgtgaccaccctgacctacggcgtgcagtgcttcagccgctaccccgaccacatgaagcagcacgacttcttcaagtccgccatgcccgaaggctacgtccaggagcgcaccatcttcttcaaggacgacggcaactacaagacccgcgccgaggtgaagttcgagggcgacaccctggtgaaccgcatcgagctgaagggcatcgacttcaaggaggacggcaacatcctggggcacaagctggagtacaactacaacagccacaacgtctatatcatggccgacaagcagaagaacggcatcaaggtgaacttcaagatccgccacaacatcgaggacggcagcgtgcagctcgccgaccactaccagcagaacacccccatcggcgacggccccgtgctgctgcccgacaaccactacctgagcacccagtccgccctgagcaaagaccccaacgagaagcgcgatcacatggtcctgctggagttcgtgaccgccgccgggatcactctcggcatggacgagctgtacaagtaagaattccgatcatattcaataacccttaatataacttcgtataatgtatgctatacgaagttattaggtctgaagaggagtttacgtccagccaagcttaggatctcgacctcgaaattctaccgggtaggggaggcgcttttcccaaggcagtctggagcatgcgctttagcagccccgctgggcacttggcgctacacaagtggcctctggcctcgcacacattccacatccaccggtaggcgccaaccggctccgttctttggtggccccttcgcgccaccttctactcctcccctagtcaggaagttcccccccgccccgcagctcgcgtcgtgcaggacgtgacaaatggaagtagcacgtctcactagtctcgtgcagatggacagcaccgctgagcaatggaagcgggtaggcctttggggcagcggccaatagcagctttgctccttcgctttctgggctcagaggctgggaaggggtgggtccgggggagcagcggggcgggctcaggggcgggctcaggggcggggcgggcgcccgaaggtcctccggaggcccggcattctgcacgcttcaaaagcgcacgtctgccgcgctgttctcctcttcctcatctccgggcctttcgacctgcatccatctagatctcgagcagctgaagcttaccatgaccgagtacaagcccacggtgcgcctcgccacccgcgacgacgtccccagggccgtacgcaccctcgccgccgcgttcgccgactaccccgccacgcgccacaccgtcgatccggaccgccacatcgagcgggtcaccgagctgcaagaactcttcctcacgcgcgtcgggctcgacatcggcaaggtgtgggtcgcggacgacggcgccgcggtggcggtctggaccacgccggagagcgtcgaagcgggggcggtgttcgccgagatcggcccgcgcatggccgagttgagcggttcccggctggccgcgcagcaacagatggaaggcctcctggcgccgcaccggcccaaggagcccgcgtggttcctggccaccgtcggcgtctcgcccgaccaccagggcaagggtctgggcagcgccgtcgtgctccccggagtggaggcggccgagcgcgccggggtgcccgccttcctggagacctccgcgccccacaacctccccttctacgagcggctcggcttcaccgtcaccgccgacgtcgaggtgcccgaaggaccgcgcacctggtgcatgacccgcaagcccggtgcctgacgcccgccccacgacccgcagcgcccgaccgaaaggagcgcacgaccccatgcatcgatgatatcagatccccgggatgcagaaattgatgatctattaaacaataaagatgtccactaaaatggaagtttttcctgtcatactttgttaagaagggtgagaacagagtacctacattttgaatggaaggattggagctacgggggtgggggtggggtgggattagataaatgcctgctctttactgaaggctctttactattgctttatgataatgtttcatagttggatatcataatttaaacaagcaaaaccaaattaagggccagctcattcctcccactcatgatctatagatctatagatctctcgtgggatcattgtttttctcttgattcccactttgtggttctaagtactgtggtttccaaatgtgtcagtttcatagcctgaagaacgagatcagcagcctctgttccacatacacttcattctcagtattgttttgccaagttctaattccatcagaagctggtcgagatccggaacccttaatataacttcgtataatgtatgctatacgaagttattaggtccctcgaagaggttcactaggcgcgccggtgcctgcccttctaggaatgggggacagggggaggggaggagctagggaaagaaaacctggagtttgtgccagggtttttgggattaagttcttcattcactaaggaaggaattgggaacacaaagggtgggggcaggggagtttggggcaactggttggagggaaggtgaagttcaatgatgctcttgattttaatcccacatcatgtatcacttttttcttaaataaagaagcctgggacacagtagatagacacacttatcttggtttgtccttcagttactgaggtggggatgggaatatccaatgctcatacccaagtgaccctgaaactaaggtgccatttacactccttaaggtcacacaacatcagagggagagctgggattgcagccaagtttatttgtacagggccctgtgataggctagttcccaaaagcctgtgatgcaagaacttttgcccatagactcagtcaccatgtagctgttacctgttcagagctggctttttgctttcccaccctactctggaattcttaaatggctttatacttagaaatcatcttatttctgttgaacctagatcaccccaaccagaaacttctattaatactttgtgctttcttgataccagggtctatttggtttccacttaaggtttttgcatactctgcccataagtgactcattagttacggccggccaaaagggcgaattctgcagatatccatcacactggcggccgctcgagcatgcatctagagggcccaattcgccctatagtgagtcgtattacaattcactggccgtcgttttacaacgtcgtgactgggaaaaccctggcgttacccaacttaatcgccttgcagcacatccccctttcgccagctggcgtaatagcgaagaggcccgcaccgatcgcccttcccaacagttgcgcagcctgaatggcgaatggacgcgccctgtagcggcgcattaagcgcggcgggtgtggtggttacgcgcagcgtgaccgctacacttgccagcgccctagcgcccgctcctttcgctttcttcccttcctttctcgccacgttcgccggctttccccgtcaagctctaaatcgggggctccctttagggttccgatttagtgctttacggcacctcgaccccaaaaaacttgattagggtgatggttcacgtagtgggccatcgccctgatagacggtttttcgccctttgacgttggagtccacgttctttaatagtggactcttgttccaaactggaacaacactcaaccctatctcggtctattcttttgatttataagggattttgccgatttcggcctattggttaaaaaatgagctgatttaacaaaaatttaacgcgaattttaacaaaattcagggcgcaagggctgctaaaggaagcggaacacgtagaaagccagtccgcagaaacggtgctgaccccggatgaatgtcagctactgggctatctggacaagggaaaacgcaagcgcaaagagaaagcaggtagcttgcagtgggcttacatggcgatagctagactgggcggttttatggacagcaagcgaaccggaattgccagctggggcgccctctggtaaggttgggaagccctgcaaagtaaactggatggctttcttgccgccaaggatctgatggcgcaggggatcaagatctgatcaagagacaggatgaggatcgtttcgcatgattgaacaagatggattgcacgcaggttctccggccgcttgggtggagaggctattcggctatgactgggcacaacagacaatcggctgctctgatgccgccgtgttccggctgtcagcgcaggggcgcccggttctttttgtcaagaccgacctgtccggtgccctgaatgaactgcaggacgaggcagcgcggctatcgtggctggccacgacgggcgttccttgcgcagctgtgctcgacgttgtcactgaagcgggaagggactggctgctattgggcgaagtgccggggcaggatctcctgtcatcccaccttgctcctgccgagaaagtatccatcatggctgatgcaatgcggcggctgcatacgcttgatccggctacctgcccattcgaccaccaagcgaaacatcgcatcgagcgagcacgtactcggatggaagccggtcttgtcgatcaggatgatctggacgaagagcatcaggggctcgcgccagccgaactgttcgccaggctcaaggcgcgcatgcccgacggcgaggatctcgtcgtgacccatggcgatgcctgcttgccgaatatcatggtggaaaatggccgcttttctggattcatcgactgtggccggctgggtgtggcggaccgctatcaggacatagcgttggctacccgtgatattgctgaagagcttggcggcgaatgggctgaccgcttcctcgtgctttacggtatcgccgctcccgattcgcagcgcatcgccttctatcgccttcttgacgagttcttctgaattgaaaaaggaagagtatgagtattcaacatttccgtgtcgcccttattcccttttttgcggcattttgccttcctgtttttgctcacccagaaacgctggtgaaagtaaaagatgctgaagatcagttgggtgcacgagtgggttacatcgaactggatctcaacagcggtaagatccttgagagttttcgccccgaagaacgttttccaatgatgagcacttttaaagttctgctatgtggcgcggtattatcccgtattgacgccgggcaagagcaactcggtcgccgcatacactattctcagaatgacttggttgagtactcaccagtcacagaaaagcatcttacggatggcatgacagtaagagaattatgcagtgctgccataaccatgagtgataacactgcggccaacttacttctgacaacgatcggaggaccgaaggagctaaccgcttttttgcacaacatgggggatcatgtaactcgccttgatcgttgggaaccggagctgaatgaagccataccaaacgacgagcgtgacaccacgatgcctgtagcaatggcaacaacgttgcgcaaactattaactggcgaactacttactctagcttcccggcaacaattaatagactggatggaggcggataaagttgcaggaccacttctgcgctcggcccttccggctggctggtttattgctgataaatctggagccggtgagcgtgggtctcgcggtatcattgcagcactggggccagatggtaagccctcccgtatcgtagttatctacacgacggggagtcaggcaactatggatgaacgaaatagacagatcgctgagataggtgcctcactgattaagcattggtaactgtcagaccaagtttactcatatatactttagattgatttaaaacttcatttttaatttaaaaggatctaggtgaagatcctttttgataatctcatgaccaaaatcccttaacgtgagttttcgttccactgagcgtcagaccccgtagaaaagatcaaaggatcttcttgagatcctttttttctgcgcgtaatctgctgcttgcaaacaaaaaaaccaccgctaccagcggtggtttgtttgccggatcaagagctaccaactctttttccgaaggtaactggcttcagcagagcgcagataccaaatactgttcttctagtgtagccgtagttaggccaccacttcaagaactctgtagcaccgcctacatacctcgctctgctaatcctgttaccagtggctgctgccagtggcgataagtcgtgtcttaccgggttggactcaagacgatagttaccggataaggcgcagcggtcgggctgaacggggggttcgtgcacacagcccagcttggagcgaacgacctacaccgaactgagatacctacagcgtgagctatgagaaagcgccacgcttcccgaagggagaaaggcggacaggtatccggtaagcggcagggtcggaacaggagagcgcacgagggagcttccagggggaaacgcctggtatctttatagtcctgtcgggtttcgccacctctgacttgagcgtcgatttttgtgatgctcgtcaggggggcggagcctatggaaaaacgccagcaacgcggcctttttacggttcctggccttttgctggccttttgctcacatgttctttcctgcgttatcccctgattctgtggataaccgtattaccgcctttgagtgagctgataccgctcgccgcagc

SEQ ID NO: 3 - DNA, 57156 bp, synthetic construct
  source 1..57156: mol_type = other DNA
agtgggtacctgtaatcgcagctacttgagaggttgaggcagagaattgcttgaacctgggaggtggaggttgtagtgagccaagatcgcaccattgcactccagcctgggtgacagagcgagactctgtctcaaaaaaaaaaaaaaaaaaaaaattcctttgatcaacatctcttcaacaccttgcccttctaactatcctggacatatttttaaaaccccaccctctctcagtgccaaattgtgacttgtgacctctgagttagcccgacaggccaccccctctcactgccaaactgtgacttgtgacctctgagttagcctgacaggccaccccctctcactgccaaactgtgacttgtgacctctgagttaacccgacaggccaccccctctcactgccaaactgtgacttgtgacctctgagttagcccgacaggcctaagctctgctctcttcggaccccagttctcaacatcagcacctcggttcagctggcagcctccatgccttcaggattccagcctgcacagactccagaccctacggccccagtcgcctacttcccatacttcaacaggacctacctgggggtggccgcgtcactcaacgggggcaatgtgctggccacgttcgtccacatgctggttcagtggatggcagatctaggtaaggtgtggcccacacagcgctgtgttctctgcctgtcctttctacccggcagggtctcggagcttcacggagcttcatgtgcggtttcagcgtccacattgaggtctcagaccctgccaggtcctggcatatttctcccatcctttgggatctgagcttgcagcctcttttcttcttgtcctccaagctgccatcacctactcttttctttgggtcaggcacccttcccccaaccttgactgtgaaccttcctaacagtctccccagctttcccccgccctccctgctccctcttttctcctcctgctcctttctcttatccttggggtagaatttatgaagttttctctgctctccatggacagttgctccttgacttacaatggtgcgtatttcacttacaatgcacttatatcctgagaagcctggccataggaagtgcgatgcaggcttttcttcttcttcttcttctttttttttttttttgagacggagtctcgctctgtcacccaggctggagtgcagtggcgcgatctcggctcactgcaaactccgcctcccaggttcaagggattctcctgcctcagccttccgagtagctgggattacaggcatgcgccaccacgcctggcaaatttttgtctttttactagagatggggttttgccatgttggccaggctggtcttgaactcctgacctcaggtgatccacccgcctcggcctcccaaagtgctgggattataggcatgagccactgtgcctggcctgatgtaggcatttcttttcttttcttttcttttcttttttgagatggagtctcgctctgttgcccaggctggagtgcagtagtgcgatctcggctcactgcaatctccgcctcccaggttcacgccattctcctgcctcagcctcccaagtagctgggactacaggcacccgccaccacacccagctaatttttttgtatttttagtagaggtggggtttcaccgtgttagccaggatggtctcaatctcctgaccttgtgatccacctgcctcggcctccaaaagtgctgggattacaggcgtgagccactgcgctcgccctgatgtaggcatttcttaaagaagcacggtgcggggtggaacccaggagagtgactttggttcccagctgtgtccctgagtcattatttggccttggcaagtcccttcccttctttgttttcccatctccagtgtcttgtggtcttaagtccttgggttagaattaactcaacagctcatagcagctttcgcctccattcgtcctcactaaatagactgggggagctgaggacgcaggcactctgctagaggccaggcctctcttccaggcctccagctggtatgcaccttccttcaggtaccccagagcttgggtcatggcccaagtatttcccagagaggaggaagagtatgttttaaccttcccttccaaccttttttggcgctgtgcatggtggcacgtggctgtaatcccagctactcaggaggccgaggcgggaggattgcttgagctcagagttgttcaagtccagcttgggcaacatagcaagaccctgtctgtaaaaaaaaaagaaaactttttttcctgaacttttactaaagaaagataagcacatgatttaaaaaataaaatagccaggcgcggtggctcatgcctgtaatcccagcactttgggaggctgaggcgggcggatcacctgaggtcaggagttcgagaccagcctggccaatatagtgaaaccctgtctctactaaaaatacaaaagttagccaggtgtggtggcacacgcttgtaattccagctactcgggaggctgaggcaggagagtcacttgaacccgagatgcagaggttgcagtgagctgaaataataccactgcacctgtgcatttgcagaggttaaacattcccatggcgtgactcctcagtgactctctagattggtgggtcttggcactgaccacaccctggaaatactgtggagtttaaaaacatcgttgcatcctggtcccacgcccagaaatgctgatttattggacctggggtgtgggccttgagcatgagttttataaaagttcctcaggtgattctgaggcctgaagtgttaataagcactgctctagaactgtctcctcagaaagcctggtctactggcctggagtacagtttcctctgggagcttttaacaaatgcagaatgttagggtcagccctaggcaatctgagtccaagctatgtgttaaaaagatccctggctgggcgtggtggctcacacctgtaatcccagcactttgggaggccgaggtgggcggatcacgaagtcaggagttccagaccagcctggccaatatggtgaaacaccgtctctactaaaaatacaaaaattagcctggagtggtggcatgcacctgtagtcccagctactcgggaggctgaggcagaagaattgcttgaacctgggaggcagaggttgcagtgagccgagatcgcgccactgcactccagcctgtgtgacagagcaagactccgtctcaaaaaaaaaaaaaaaagatccctgagtgactcatctgtatgttcaggttggagaagccctaggctggagaagccctaggtctaggtcgggggctccccagcgtggctgtgtataagaatcaactgcaagtgtttacaaattccagcccgcagcctgcaacccacaccagttaaatcagaaagtctggagatggggcccacagtgctctcaagaaaccctgatgttgataactttcttcttatcaaggtgatgtttgctttccctcaggtcatgcgaggttatagatcaaaagtgattctaaggtcaaagtgtatcgaaaccaaaggctttttttttttttttttaagactgagtctcgcactgtcacccagactggagtgcagtggcaccatctcagctcactgcaagctctgccttctgggttcaagcgtttctcatgcctcagcatcccaagtagctgggactacaggcacacactgccatacctggctaatttttgtatttttagtagagacagggttttaccatgttgtccaggctggtctggaactcctgacttcaagtgatccgcctgtcttgacctcccaaagtgctgggattacagcgtaagccaccgcgcttggcctttttttttttttcgtttgtttgttttaagaatgcagagctggcggggcatggtggctcatgcctgtaaccccagtactttggaaggctgaggcaggtagatcacttgaggtcgagagcttgagaccagcctgtccaatgtagtaaaaccttgtctctactaaaaataccacaattagccaggtgtggtggtgtgggcctgtaatcccagctacctgggaggctgaggcaggagaatcgctggaacccgggaggcagaggttatagtgagccgataggatatgtgccactgcactccagcctgggtgacacagcgagcctcagaaaaaaaaaaaaaaaaaaaaaaacccgcagagctaacgtggtgtcagggagaaaagtccgatcgggattctggcttgacactgaaaagcaagttgtaggatggtcaactcatccttcttccttggatttcaggtgccctgtgcacataacgagggtggcccattcagtgattggtcctggatcctgggatttctgatgctgctaacgaccccaatgacatccatgatgatagttttgtttgtttgtttgttttagatggagtcttgctcttgttgcccaggctggagtgcagtggtgcaagctccgctcactgcaacctctgcctcccaggttcaagtgattctcctgcctcagcctcctgagtagctgggattacaggtgcctgccaccacgcccggttaatttttgtacttttagtagagacagggtttcaccacgttggccaggctggtcttgaactcctgacctcaggtgatctgcccgccttggcctcccaaagtgctgggattacaggcgtgagccaccacgcccagccaatgatagttattagtctgtatatgcatttggtccccttggttaagaagcctgtgttaggggtagggctcatggcagcacttaatgagacctcaccctgatgtctggctggggtctgcactgagacagcgggcggggatccagggcagagtgtagctagcctggctatagcagtccctgagcccagaaccaccagctgcagcgggaggagaagcagcaagtagcgctgttcccaccctgtgggaattctctgccatgtcagcctgcactgagggggacgcatgagcttacacagatcttctctgtctctggcaggcctggaggttgaagaatccactgtgtattcacgcatgattcaggcagctgtgcagcagagagatacccacctgaccatcaccccgacagtgctgggggagaggcacctgccggaccagctggcctcagtgaccagaatctcctcctccgacctctccctggggcacgtgacccgggctctgtgccgaggcattgttcagaacctgcactccatgcttccgattcagcagctccaggagtggggcgtggagagggtgatgggcagtgggagtgcgctgtccaggaatgacgtgctgaagcaggaggtgcagagggctttccctttgcccatgtcctttgggcaggatgtggatgcagctgtcggggcagctctggtcatgctccggagacacctcaaccagaaggaatcttagacagcaaactctttcgccaaacgactgctgtgaattttacctgattaacattcctgacaccatctgtgggtcatcctttccctggaccgttcagtggacagctttcaagcagtgcttgttgtgaggtcccatctcggccaagaacttaccttcagaacatactctaataatgcagccaggagccgtcagccagatcccaaatgagtgccttccgaaattgacccacctgggagctatttacaaatgtccatgtgggagagagagagcatgagagcacagtagcccagcctgctggtcagcaggctcatctgtggttcacctgtagacagagagcagatcaatgtgtacttcagacaccagaaagtctggtggctttggtcccaagtgggaaaagagaactgccccatgcccagcttgtgattatcgtttttggagacctgaagcccacactcgggtcgtatggacttctggaaaagttcttgtctcctggactgaaccatgtgaccggaggcccctttcctagtctcatcctcccctggctgcagatgcttagctgggccagggattgacccaagcgcgatgcagcaggcaggctcagaagacgatgcggggctgtgtgccggccttcttgctgcatgtactcagcctcaggagagcttgctgcacccaggccgcccaggtcttcacagcacaactgcctggaaggcaggttgcgagaaggagaggcggatggcatgagcagcaagggggaccgatgctgtgcagctcacaccactccagaacctgacaaggcaccagcaggaccccttgccaggagcatgtctgtgcagcagtgtttttgcccctgcacattccagaagccctcatgggaagggatgcagccaggcagactcctgccagatggggcaggtagtttattcaaagagaactctgtatcccataggcccaggctctcctttcgcttggcgtgggctttgctggcccagtgtgtgctcctggctcagcagaaacatccatttgagttggcatccctgtagggatcccagagcgttgtaagccttcttgtgattggtagggatggctgtggggtggcttccaggagggggccaccattgccgcatctacttctagactcccaaaggagcccaggctcaggcaggcctggcccagagtcacgctggcaaccacgagtttgggaagcagtcgtattctctctctctctctctctctctctctcagtatccatgacaggtatgaaacatattgtctctttataaatgtcattttacaaattatgtgattatctggaagctctaagatgagagcaaatgcctgatcactctggccaaatgtcagatactaaagcccattcttggccgggcatgttggctcccgcctgtaatcccagcactttgggaagcccaagtgggtgaatcacctgaggtcaggagttcaagaccagcctgaccaacatggggataccccgtctctactaaaaatacaagccgggcgtggtggcgcatgcctgtaatcccagctactcaggaggctgaggcaggaaaatcacttgaactcgggaggcagaggttgcagtgagctgagatcgcgccattgcactccagcctgggtgacagagcaagactctgtctcataaataaatacaaagcccattcttccagagtcttgtgccttaaataaaacacacctctctgctgtgggaagactgtgcaatggcacagccgcagagcttggtttgggaggttgaagtgctctggggagaattcgtagatcatcctcagaaaagccttgccctggtgttctaccagaaaaacgtctcccaatcacccaggaaagctgtccacagtagtccccccttatccacggtgtcactttccatgggttcagttatctgcggtcaaccacggtctgacaatattaaatggaaaattcttcaaacagttcccaagttttcccttgtgcattgttctgagcagtgtgatggagagtctctgccgtgccatctgggatgcaaaccgtccctgtgttccccacgtccaggccgtagatgctccccgccggtcagtcacttagtcgtcagatcgcccgtcctggtatcacagtgcttctgttcaggtcagtctttttttacttcattagggccccaaagcaccagagtagtgatgctggtagtgatgctggctgttcggatatgccaaagagaaaccgtaaggtgcttcctttaagtgaaaagatgggaagaaaacagtcatatgctgaatcttctatctgtgaaattctaaagaaaaagaaattcgtgctagttttttttgcctttttttttttttttttgagacatagtctcactgtgtcacccaggctggagtacagtggtgcaatcttggctcactgcaacctctgcctcccgggttcaagcgattctcttgcctcacccttctgagtagctgagattacaggctcctgccaccacgcctggctaatttagttttagtagagatggagtttcatcatgttggccaggctggtctcgaactcctgacctcaggtgatccacttaccttggcctcccaaagtactaggattgcaggcgggagccactgaccccagcctcatgccagttttgctgtcacacctcaaactgcaaaagtatggtcacagtgtgtgataacttttattagagtgtattgttaaaaccgttctactttggctgggtgtgggggctcacacctgtaatcccagcactttgggaggccgaggcgggtggatcacctgacatcaggagtttgaaaccaacctggccaacgtggtgaaaactcgtctctactagaaatacaaaagttagctgggcatgatggcacgcgcctgtaatcccagctacttaggaggctgaggcaggagaatcgcttgagctctggaagcagaggttgcagtgagctgagatcgcaccactgcactctagcctgggtgacagagcgagactctgcctcaaaaaaaaaaaaaaaattgttctactttattgttgttgttaatctcttactgtgcctaatttgtaaattaaattatattacagatatgtatgtgtagaaaaaacatggcatatgcaggatccaatactagccttggtttcaggcatctatgcagggtcttgggacatatctcctgtggatgacagggggctactgtattttttttttcttttaggcagagtctccctctgtcgcccaggctggagtgcagtggtgcgatctcagcccactgcaacctccacctcccgggttcaagcaattcttgtacctcagcctcccgagtagctgagattacaggcatgtgctaccacacctggctaatttttgtatttttagtagagatggggtttcaccatgttggcctggtcttgaactcctgacctcaggtgatccacctgcctcagcctcccaaagtgctgggattacaggcgttagccaccatgcctggcctgctactgtaatttttctttcagccaaatgagtttaagatgctgtcattgcagccctgaggaaggctgcatgagagagaagagtaggctgagtttaccagcgtcctttgtcttttgggaggagccaggccgtctaatctcagagtggcagcctgtctcgcctgcccagcatgcagtggatggggtctgcaaatgtaaggttaggaacgggatggacatccagcaagctcaggcagcccagccttgtgcctggtgtggccccggaactctctgtcctctttccagactatgcattcactctgcctctgaggactgagccttggagggtcccagtttgtcaataaacagggctgctcctgctgcttccgttgcctgaggcctggagcctccgtctaggtgggggatgagtgcagctgcctgaagtcacaaccacgtgcacaacccaccctccttcccaggaggtgccagtaagtggtttgaggccggcatgcttctgaagaagtggtgagcggggctcctttgctggccgtcagtatcccgatgctatgagcccacggcagggctgcaccttccccccgatccgcttcggccagtgggacgtgcacagggaatgcctgtcactcctgggcagaggtctttaggagccagtgagctacttgccacacacccttccctttgccacaagtgactggcagtgccccagagagtggtagctctgtcagcctgggtccctgagtgaggacagtgtggtgtagagttctcaccaaccagcgagggacgtgcagtgggacagagaagtaagcgccctttggtgcagtgcctcacacctgtaaacccagcacttcgggaggccgaggagggcggatcacttgaggtcaggagttccgagaccggcctggccaacatggtgaaaccccgtctctactaaaaatacaaaaaaattagccgggcatggtggtcggcacctgtaatctcagctacttgggaggctgaggcaggagaatcgcttgagcctggaaggcggaggttgcagtgagctgagatcatgccactgtactccagtctgggagacagagcgagattctgtctttaaaataaataaataaataaataaataataaacctttgatgtttgaagccactgagatttgggggttgtcaccacagcagagcagcctcagtagcctgcacctgggacgtctcccatgcacccagcacagacccaggcagccacattttctgagcgcccagtagtagctgggtgttctctcagagactgccccccgttgaatttccatcacgaggcaatggaaaaataccaacagttggttacataaacagaccctaggaaaagaaaaagacacagacaatgacagcacctctatgcccagagggaggagaaattcattctttacacaagtcacattgagctaaacctccaagggtttccatccatggttactaacgacagttaacatttctttttgagtacctgctgtgtactgggatctgatctaaactctacttgtttgaattcattgaatctttttttttttttaaatggagtctcactctgttacccaggctggagtgcagtggtgcgatctcagcttactacaacctcagcctcccgggttccagcaattctcatgcctcagcctcgcgagtagctgggattacaggtgtacaccacctcacctggctaattttttgtacttttagtagagacggggttttgccatgttgcctaggctggtcttgaacttctggcctcaagtgatccacccacctcggcctcggaaagtgctgggattataggcatgaggcaccatgccaggcctcatttaatctagaaggtgggtagtgttatccccatttcacacatggagagatagataaacaaaaaagttaagtaacttacctgagatcacagtgctaggattcaaaccccagagcgaacccactctctttagcaactaggcagtggggtcaggctaggtaaatgtgtttacattaaagtgatcgtcatgtccagagtgtgacaaattggtgtaacttggtcatagtgtgaatggaaggatgtttataggagttgtggctggacgtgttgggcagactgtgaagggtcttgcatgcccgcctgaggggattggactgtctcctgtagacagtggggtttggaggactggggccttgggagtgtagctgacagtgtggacgctggattggaggaagggtgttctgggagacaggaggctgtaaaacagcctggagagatggtgggccagacccagttcagggcagggtaggggactccagcccaccagccgctgcttttcctcccgccacacactgcctgcctctgggccttgaccccgtccacatcatgtgtatgtggctttcatgttctctacttttctcttcttcttctttttttctttttctttttctttttttttttttgagactttttgagagtcttcctctgttgcccaggctagagtgcagtggtgcgatcttggctcactgcaacctccgcctcctgggtttaagcagttctcctgcctcagcctcctgagtagctgggattacaggtgcctgccaccacacccagctaatttttgtatttttaatagagacggggtttcaccatgttggccaggctggtctcaaactcctgacctcaggtgatccgcccgcctcagcctcccaaagtgctgggattacaggcatgagccaccacgcctggcctatttttctcttcttctgaagtggactgaaagctctttgagagcaggtgcctaggtgtcctcagccctgtcctcctgcaccttagctcatgccaaggcccatgtttggaatgtcctccttgtggggcagaatccttctccttgtccaaggcccagcccaaatggcatctgccctctgcaaagggcctccctggtgacacatacgccatctgattacaactgcaggggaggccaagacccggctcaacatttgttgttggcatggtctgttggccccagagcccctggcctgtgcctgttacagggtgccctgccctgcctagtgtcaagagagagcctgtgcacatcttcctttcctgtccatcgtgggcttcttgagcgcagagaccaccctgttgaccctactgctctgctaggggatttgtatagcacatggtgggccctcaggagagagggtctcacctggcctctcccctcagccacaggtagatggacaggccaagtctttgaaagtgggagagtcctgatacagagatgctcacttgcgtgactcatcaaacattaagcaaaccttgtttttttcattaaaaaacaattagtcataacttcgagctaatggccggatacagctcagcagtcagcagatgtggtcctcaggctgaaataatgaagatgagagcagtcatctctcatgcctgcctagagctttaccaggctcagagcccattcacacccactatcctgactaatcccagaaaagcctcgtaaagcaggtagggcaggtgttcttggctgtaattttgtggaggaagaagtagacccagaggttcagctaccagccggagtccatacagccggcatctagcacacgcgggcctcttccatccaaggtccaggttctacccacctgctgaccctccattggccctcgtccctcttgttcccagtccctgccctggaacacagctctgcagagcggggctccagcgttctgtgctgactgggtgtctgacccctccccagctcagacttcaagctctagccacttctggagggtgctgaccggctcgcagaccgctgccctccacggaagctggtcttttagactcttgggcacccggtgacaggaacacagagacgaaatgcaggaaggagggtatttttctttttttttttaattttaattttaattttttgagatggagttttgctcttgttgcccaggctggagtgcaatggcgtgatctcagctcatgcaacctccacctcctgggttcaagtgattctcctgcctcagcctcccgagtagctgggattacaggcatgcaccaccacgcctggctaattttgtatttttagtagagacggggtttctccatgttggccaggctggtctcgaactcccgacctcaggcgatccacccgcctcggcctcccaaagtgctgggattacgggcgtgagccactgaggccggctggggctcgaatcttgagaggaacccaggtgagtgaagaaaagaaatttgtctccgatggccagtgtcaagagctcagcttaatgtcaagaactcagcttaagtcaatgtgccccctagtggtaacactaagagaaaactgtcaccattagcgacggtggcggtgtttagcatctgccattccagatttggcccagccgctggctggcgcgtccgcagacgctttcctgagctgcctctcgctcccatcaaacctgaacttagaaaaccaccctccctcccagaagtcattaaaacttttctactcacaaggagttttaatgggtacatcattacataaatgcaagaacatcctgtttcaaatgatgacccagaaaaccacactgatggcagtgatggccagccctgaggtcttgtccccgccaccatgtcgagagttttagtggaatcactccgtgaaggtgctgttcagataaagccaaaaaccacgccaacaaacgtttcctgagtgctgctttgagcaaggtgcaagctaggttcagagaggggagggcacgagagccgtatgtatctcaccctggagctgcttaaatctgcaaagcaagacacaagaaaatcatgacgttacatgtctatacaagatttagaaagctccagacgagactagtagagctgtcactgtccttcggcaggtgtgtagcctgtctgtgcttctttccttatcagtaaaacggggacaaaattgtactcacctcatgaactcttactgaggtctgatgagatagtgcatataaagtgctcatgccaacacccaggacgttgtacgcactcaacacatattcacagccattactgttgtcatcattgtggccatgagtactgtgcccgttgccataggaagcgcattggttgaagttcctgtaggagtttagaagtgagcacttctggagttgggcgtggtagctcatgtctgtaatcccagcatattgggagactgaggtgggggatcacgtgaactcaggagtttgagaccagtctggcaagatggcgagactctgttgctaccaaaaaaaaaaaaaaatccgagcgtggtggtgcacacctgtagtcccagttacttgggagggtgaggcaggaggatcctttgagtccaggaggtggaggctgcagtgagctatgattgtgagtcccttgcattgggtgacaatgcaagataccacctctttaaaaaaaaaaggtgagaaatgagctctttatgctggggcctttgggagaaggtgggatttgagcatccctagggctcacctcgcacttgaagatgggttaagtggggtactgggatggaggagggtgggggaaagggtggagtcagcacgtttagtgtggctgggaaggggtgtgcccaggtgacagaaggtgggtttcggtgggagaggagactgggtctgtgggctcagggtgcgggggtggggcgttgctcagcagtggggacccctgagaggcaagggggcctgatcaggatgagcttccaggactgttgatctggaggtgaggggttgtgggaggttggaccagggaaaggaggcacttctggtcattcaggtgagaagaaggggctcccaggtagaggagggatggacggaagccacagaaacagcccagggagggccgagaaggagaggctggaggtcacaaagggcaccgggtttggtggccagaaggaagttgatgcctttccaggcagggactgctgcagggagcgggaggggagtgaatgtggagggaacaggagcccattgtgggttatgctggggggagggggcttgtgggcttcacctgcagattcagggaggcagggatggagctcagggaagagggctgggtggactctggatgaagcagccgctgacttggacacatcagagaggtccttgggaggggccaggcgaaggtctccaaggacagtggtggagctggagaagataaggctgcggacggggtccttggacccccaggtgtggggaacggcaagaagaggagagcagccagggagtcccggcaggagtggccagggcaggaggagggccgggacttcccctgcaggcctctgagcaggcactgtgccctgtagactccggtgatactgttagcaccaagggctctgttaacaaagaggacaggacacatttagtgatgtgtgctgtgttcactggaaatggtgctgtcttttgttttgtttcgttttgttttttttaaatggagtctcgctctgtagcccgggctggagtacagtggtgtgatctcagctcactgcaacctctgcctcccaggttcaagtgattctcgtgcctcagcctccagagtagctgggactacaggcgtgcaccaccacgcccagctaattttttgtatttttagtagagacaaggttccactatgttggctaggctggtcttgaactcctgacctcagacagtccgcccacttctgcctcccaaagtgctaggattacaggcttgagccaccgtgcccggctccgtgctgtctttattggaggcagaaatcactttggaggctaaggcaatggttctggagaagaagcatgaccatcccctttcccagccattgctctatcccacattgttagaaggaaatgatcccagaggactagaaagttgagaggtcaccactgctgagtcttttatatatgacagatcccacttctgggtctatatgtgcccaaaagaatggaaagcagggacaggaccagatatttgcacgcctatgttcatagcagcactagtcactatggccaaaggtggaagcaagccaagtgttcatcagctggtgaatggatgagcaaaatgtggtccatccatcccacgccccagtggaatattactcagccttaaaaaggaaggagggctgggtgtgatggctcatgcctgtaatcccaacactttgggaggctgaggcaggtgaatcacaaggtcaggagatcgagacccgcctggccaacatggtgaaaccccatttctactaaaaattagttgggtgtggtggcatgcacccgtaatcccaactactcgggaggctgaggcagaagaattgattgaaccagggaggtggaggttgcagtgagctgagatcacgccattgcactgtagcctgggggacagagtgagacttcatctcgaaaaaaaaaaaaagaaaagaaaaaaaggaaattctcttacaggctactacatggatgaaccttgaggaaattatgctaagtgaaagaagccagtcacaaaaagcaaagagacaaatactgtatgattcctgaccagaggactcctagaatagttaaattcataaagacaggaagttgaatggtggtcgttagggggttggggtcgggaaggggagttagtgtttaatgggtgcagggtttcagtttgggatgatgaaaaagttctgtgcatggatgatgctgatggttgtacaacagtgtgaatgcactgagtgccactgaactgtactgttaaacatggttaatacggtaaattttgttatatatattttgccacaacttattataatatataaatatatattttgagacagagtttcgctcttgttgccgaggctggagtgcaatggtgtgatcttggttcactgcaacctccacctcccgggttcaagtgattctcctgcctcagtctcccgaatagctgggactacaggtgcccacaaccacgcccagctaattctgtatttttagtagagatggggtttcaccatgttggtcaggcctggtctcaaactcctgacctcaggtgatccacctgcctcggcctcccaaagtgctggggttacaggcatgagccaccgcgcccggccttttgccacaatttataaacaagaatgaattctaacgttcatattaattgaagctaacatgacacacatagcataaacaggtgtctaagcggccaggcgcggtggctcacgcctatgatcccagcactttgggaggccgaggcaggtggatcacttgaggtcaggagtttgagaccaggcctgaccaacatggtgaaacccagcctctactgaaaacacaaaaattagccaggcgtggtggcacgtgcctgtaatcccagctacttgggaggctaaggccggagaattgcttgaacctgggaggcagaggttgcagtgagccgagattgcgccattgcattccagcctgggagacagagcgagacaccatctaaaaaaaaaaaaaaaaaaaaagtgactaagcgaggggtatggtggggtgtggcgtggtgggatgggcctggcttttatgcctagaccaacgtgcggcctgggcaattatctaattatcggttgtctaattgcccagcgtcacacatttctcacctgtaaaatgggtatgacagtctctgccctcccactgcccggggttgctgtacggcctgcgagagcgggtttgggaaagctctttgtcaactgctgtgcggaattgatggggtggccacacttcaatgccttgactcaggggtcagagctttcaagcgaccccaggcagggttacgagggcctccctggcagtggctgcttattccaggctggacctgccctacggcttgttggcgtcccgcaggcagctgctaggatggtttttgcagggcatttgggccgcagcctggatgcatacctagacctcactgtttttctcagccagggtctgggagagaatgaaacctattgttctagttatctgctgtatgtgactctctcctgtgcgtttctctcttgtgggtcttctctcctgtgcatttagggtggtatgaagtgaagagagaaaatagacacttgtggccgggcgcagtggctcacgcctggaatcccagcactttgggaggccgaggcaggtggatgacgaggtcaggagttcaagaccggcctggccaacatggcgaaaccctgactctactaaaaatacaacaattagctgggcgcaatggcaggtgcctgcaattgcagctattcgggaggctgaggcaggagaatcgcttaaacctgggaggtggaggttgcagtgagctgagatcgcgccattgcactccagcctggacgacagagtaagactctgtctcaaaaaaaaaaaaaaaaaaaggaaatgacactgatagttatctgtgttttgtggttccctgaggaacccccagttgagaagaaaggctgggacctggctgacccagaagaccccctcgacgccaacccctactccaggtttggggacccaggaacgagaggcctaagagagttagggactagttcaaggttgctcggactctcaaaacaagtccctaatgccaggccagtactgtgtggcgggcagcacgaccctccattccctctttattttgaaaacggaacagttacaggacgctagttttgacgtcgctggttgtgaatgtcatttgtggagccgtttcccagacctccgggggcaggagccacaggtttgagaggccgagcagcgccctcctttcctgagagctgaggttgcagctctggctggctctggtaagtgctctgcagccctggcatggctggaggaggggcagcagctaagtggtttctgaaaaagggcaaaaatgatgggaaaagctttgggatcctctgggaatcagagccgcagcaaaggcagctgcttgcatcgctggaagcgttttttccttgagtgccgaagggcgtccacagcgactcctgctagtgcagggcagctgctgccagggccgggcccgggaccccacggaggcggggagaccactcttctcccacacgagcccagctctcccttcgagtagcaaccgccttcaagctcacaagcacccgtgggcctggggtgtgcctgcgtctagctggtgagtccctttctttgtctgatggccaatgcagacattagcttttaagatggcatagtgagtggccaaaagccgggccctgtcacttcccagctgtgcgactgtgggcaggtccactcacctctctgtgccccagttaccttatctgaaaacggggggtagtaagagtggctgcctcaaaggtggtcgtgaggctgaagcgaacttgtggtgccctcagcctggctccttggaagcacctgggaggtgagagtggaggttgttgttactggggtttgttcttgttgctcctgcatcagccgtcctcgggggaggaggctgcagctgctgctgagattgctggtgtgtggccggaggttttcagcgtgtcgccctctctgtggagtggacgagcgcagggctgggaagcaggcacactgggtccttgtgctgctgtcctatctctttgttcttcacccctgggttgggaagcccgcagcctactgcctccctttgacagaagggactactgagaataatctggctgggtcctgggccagcgttctcccagcttccagaaagtccccagtggcgagcgggaggtgctcccaagaacttggatggatggatggatggatggatgctttgggcagagagaggagcaggggagccacaccccatgttgtctcacttgcattggggagagaagggatccttcccccagagggtaggcagtatctgttctggctttggagttgagaaagactcagatcataccacgtctctgtgggcagaatcgattcttttaggattgtcctttagtccagattgatgagtttgtgagtcttgtgtaaaccagaatcaccatctccatcacacagccaacactcgtttgcctaaatcacggtagaagttcccctgatcactgtagaatgttttgcggtgacaggtgcatcaccacgggcttaggtgcagggtacactccaggcctggcagtggagggctgtcctgaccctgttccccggcccagcccagggcacatgacccctcagttcctgtcccaccccgttccctggaagaagcttggtttccagtagggaatcaggtgcagagtgtgcagtatagattcagcgtttgtcgactgactgaatgatagcacaatcccggctgcttcctgttggctgggtttggttggactgggacccgtcagaggaaaaggcaacgccgctgacaaagaacattgccgaaaggttcatgggaggctccggctaacaggtgctctcttgctgggctgcctaacgagcagcccctattcttattcttagcttattcttggagaccatagacatccctgggacagccaggcatgggtatgacctgggtcttattcacactgcattttggggttcctgagctgcttgtttgagcgagaggtgcttcaggttcaggtcttatgcctagccccttgggtgagagggcctattctgattggcccccaggccctgctgtggagtctgggtctgagttgaactgctgagaaagagccccagacctccagcatcgtggtggagcactggagatgctctggagccagcctgcctggggtcaagtccgggttccatctctgactgtgtgacctcggggacgtgccataactgctctgtgcctcggtctcctcatcggtgaagtatttccctcttagggatgttgtgggaatgaagtgggtgaaggaatgcgagtcctgagaaccgtgtctgctttgtgcacgtgctcagacgcatcaacgattctgcttctcattcgcttctggtgccttttaagtgctgccagggctgtccgcactgtgaacggtccttgacggggtgttatcttcagaaagggaagactagcacccggccccccaggcttccaaagcatcatccatgcaaccatgttggctttcaattccttggagttaaggctgacggccatctggttctaacccggcctcctgtcttcctgtcccactgacttcccgttcttcagctgctctaggcttccctgtctgtctccagaccctagcccacctctgttcccttcccaggctcagctcatccatcaccaactgccatggacccctcttcagcaccctgccccctcctgcagtccctccgcccagccagtacctggtttctgtctcagcggggagctgactcctctctgtgcccccagcgcagggctggactctgaggaggaggactcagtagataggtattgagtgatgagatgagggaatcggctttctgtggccgggaacactcctgctgcagggggtccacctgatgggtgagtcagagaaagactcaggcctgttgaaagtggatcaacaggcaggcagggagatggccagtagccagccgtccgtcctgttcacagcctgcggagtggtgaggctgcctctgtgttttcatggatctgagattcagaacgtagctggtttacagccatggcccagttgtgtgctctggagtttcactgcctgaattttaacttgaaaatgtaggacttgggagtctctctgagccattctggcttgggagattgcctgattatatatttcaaaaaaaaaaaaaaagaaaatgcaggacttgagaagcctctcatttcttctgcggctgttttccggaatgtagccactgctggaacagtaatctccctaacttcctatggaaatggcaattagaagggtctgattgctcttatttccccatgtgtgcagctgctgctgctgctgctgctgctgcttctttttttttttttttttttttttttgagacagagtttcactctgttgcccaggctggagtgcagtggcacagtctcagctcactgtaacctctacatcctgggttcaagcgattctcctgcctcagcctcccgagtagctgggattacaggcgcccgacaccacgcccggctaatttttgtattttttttagtagagatgggatttcaccatgttggccaggctggtctcgaactcctgacctcaggtgatccacctgccttggcctcccaaagtgctgggattacaggcgtgagccacgcgcccaggccagtacagcttcttcataaggagatggaccaggaaaggtccctgcccaggaggaggtcacagggtgcgggagagataaatcagtgacagatagcaattgctggaccacatggtaggctgtgtgggacaggcggtcagtgggctgggccactgtgtggaggacagcggggagcatgagcagggcagggatctgggggcttcatggaggaggcggcatcagtgctggatcctgaggggaagtagcatctgagtggtgataggacttgtgcaagggtagacagaggaaaaagcccttaggtggagacccgatgggaatagaggctatgggagggatgtatgggccacccctgggtgccagggagtggggatgcccagccagagggaggggaagcatggggatggggcaggatgggagtggaaaatagcatcagctcatgtgtccaactacacatgctgctgccagcggccagctgatctctaggtgtttaggcctagaagaccaaccagctccaaatcacttaaagcctaaacgttccctgtctctactaaaaatacaaacattagccacgcatggtggcgggcgcctgtaatcccagctacttgggaggctgagggaggagaatcgcttgaacctgggaggtggaggttgcagtgagcagagattgccccattgcactctagtctgggcgacagagtgagacacacagacacacacacacacacacacacacacacacacacacacacacacacacacacacacgcctaaacattcaaggccaggatgcttgacagatgttgattcataaaaatgacaaaaagcacaaaatccaaaatctcgtataagctcagtggctgtggcagcgaggttgaagagcaaaggcaggccgggcacctggctgatgatgtgtggacccgttgcacagcagggccccgcagtgcggtgtgggtgtgggtgggccagtctctgccgctcaccctattccagggacacagtctgcttggctcttctggactgagccatcctcatcaccgagatcctccctgaattcagcccacgacagccaccccggccgttttccttgttctgtgtggggagggaggcagcgcggtggttatcaacctcaccctgcagaggaggcacctgaggcccagagacgaggagggatgggtctaacccagaaccacagatggctctgagccgggggcctgtccaccctcccaggccgacgtcagtggccgcaggactgcctgggccctgctaggcctgctcacctctgaggcctctggggtgagaggttcagtcctggaaacacttcagttctagggggctgggggcagcagcaagttggagttttggggtaccctgcttcacagggcccttggcaaggagggcaggtggggtctaaggacaagcagtccttactttgggagtcaaccccggcgtggtggctgctgcaggttgcacactgggccacagaggatccagcaaggatgaagaaatggagcagcacagacttgggggcagctgcggacccactccaaaaggacacctgcccagaccccctggatggagaccctaactccaggccacctccagccaagccccagctctccacggccaagagccgcacccggctctttgggaagggtgactcggaggaggctttcccggtggattgccctcacgaggaaggtgagctggactcctgcccgaccatcacagtcagccctgttatcaccatccagaggccaggagacggccccaccggtgccaggtaagtccgcgtctggagcccccctccctgctgggagcccagctggccatggagatgccacagggtggtctggcttctgggctaaatgtcacaaagccagggggctggagagccttaggggtggtctggtccagcgtccttcctcatgtgacctcgtgggatgtgcagtcacgggggctggtgtctgtgctgggtctaggtgtccacgcccgcaatgcctaccagccacagacacttggacttgaagtctaaaagctcaagggcaggaggcttttggagagcacagcacagctccagtgagctgcaaggcagggcagggagggccacaggctggctgacttctggggagtgtgaggccaccttttcccttagaggggctgtctacacccctgcctccacctccctccgtccccaccaggctcctgcctcccgagctcccgagcaggcagagaagccagtggtctgggagtaggagggtgactttctagatggtgtctatagacagggtggggacagaatggggacacatgccctccactgtccctgttacattgcttttctggacagtcacctagactgaggggcagcttttatatcatttttcccctttttggtttgccttgggatttagtcgtgttcccttgacaagctccgaaggcctcagggccgaggggaggccagggtatgagacgagcgtgttttctggcccacaggctgctgtcccaggactctgtcgccgccagcaccgagaagaccctcaggctctatgatcgcaggagtatctttgaagccgttgctcagaataactgccaggatctggagagcctgctgctcttcctgcagaagagcaagaagcacctcacagacaacgagttcaaaggtggccccagcgctgggctcggggagggccccagccctggcctgccctgaccctcccttatgtctttcagaccctgagacagggaagacctgtctgctgaaagccatgctcaacctgcacgacggacagaacaccaccatccccctgctcctggagatcgcgcggcaaacggacagcctgaaggagcttgtcaacgccagctacacggacagctactacaagggtgaggagggcggcggggccgggcatggctcagcccgcagcaccgggaagcaggggggcatggttgtccctgggcctccttgcttctctgggatccttactccctgtcccagccactgcgttggtggctcctaatcctagggggtccctgcctctcccatctgctggcttgatttctcctggtcctgggggtctctgcctccccgatctgatgtctcctctcttgaccctgagaagtccctgcctccccctgctgactggatggtccctgtccctggaagtcacagcctctggcctttctctctgctgctgttccttgcccccggggcaattttgactcctctggcttccaacccgttatttcctgttcccaggggtctcctgtctcaggaccttgctgggaccccttgggggaccctggcctggcctcctgcagtgggggggtcctccaggcactttctgcccagttcctcctgcagcagctgctgcctgcccagagcccttccccagcacctgtcccggcagccccacaggaccgtgaccacgaagccaaccgtgcgcgtcctctgtaggccagacagcactgcacatcgccatcgagagacgcaacatggccctggtgaccctcctggtggagaacggagcagacgtccaggctgcggcccatggggacttctttaagaaaaccaaagggcggcctggattctacttcggtagggagacagtgtggcagaccctgatctttttggcttttgctaaggggaggtttgggcagagacagagggagtttggaggccggtggttcaggggccagctggatctcactcctgaggcccacctgggccctgtgttcatgcaggtgaactgcccctgtccctggccgcgtgcaccaaccagctgggcatcgtgaagttcctgctgcagaactcctggcagacggccgacatcagcgccagggactcggtgggcaacacggtgctgcacgccctggtggaggtggccgacaacacggccgacaacacgaagtttgtgacgagcatgtacaatgagattctgatgctgggggccaaactgcacccgacgctgaagctggaggagctcaccaacaagaagggaatgacgccgctggctctggcagctgggaccgggaagatcggggtaagagggggcttcggctcaggctggtgcggtgcggggctgatggcatgggagaggactgcctgactcactgcgggagcctggcgtcgctatctgtgtgtgcgggactctgattctgtcataccagcctgtagggctgttagaataagtctgagaaattgggagccacagggcagaaccctgcaatggccaacgtgccattttgaatttccagctctgagtatcagcaacaagacatggggtggggtagggtgctgggcaatggaggagggactgcctagggtggaacagaagaatagctgttgggctgggcacggtgactcactcttgtaatcccagcattttgggaggccgacgtgggtggatcacctgaggttaggagttcgagaccagcctgaccaacctggtgaaacctctactaaatatacaaaaattagccaggcatggtggcaggtgcctacaattccagctactcaggaggctgaggcacaaacatcacttgaacttgggaggcggaggtggcagtgagccaagattttgccaccgcactctagcctgtgtgacagagcaagactctgtctcaaaaaaaaaaaaaaaggaaaaagaaaaaagctgttggtgtttttccatggcaggcaggagcatggcaggcaggagctttaggtaacaaggctgatggctccagctcccagctccagctggtggctcctggtgacaggcctccagctcttggcctcaagtgatccttccacctcagcctcccaagtagctgggattacaggcatgagccaccccatctggctctcatttcttgcattctctttctttctttctggcttgaggttatcgagaatggaccaccgctgtccttcatggtgagatggtagagctggggcctcgccgtgaggggattgtgggcctgatatggtgcaggtagtatctgaggcagctggctggttgacgtttgtgtgttttgtttttttttttttttttagatgaggtttcgctcttgttgcccaggctggagagcagtggcacaatctcggctcactgcaacctctgcctatcaggttcaagtgattctcctgtctcggcctctcaagtagccgggattacaggaacacgccaccatgcccggctaattttttttttgtattttcagtaaaaacaggattttgccatgttggccaggctggtctcaaaatcctgacctcaggtgatccacccgcctcagcctcccaaagtgctgggattacaggcatgagccacccgtgcccggccggctggttgatctcagtggtggtcaggagtgggtggggactcgcctggggcttaggtggggccaccagctgggctgggaagcagagctggttgttgaggtactgtctgaggctgagcctggggctggcctctgacgggctcttgctccccgggggcaggtcttggcctatattctccagcgggagatccaggagcccgagtgcaggcacctgtccaggaagttcaccgagtgggcctacgggcccgtgcactcctcgctgtacgacctgtcctgcatcgacacctgcgagaagaactcggtgctggaggtgatcgcctacagcagcagcgagacccctgtgagtggctggggcacagccagggagggcctcagggcctctgcacccaagccccaatcccagcccctggtccagctccagctggcttctcaggagggaaagcctgctgcgcccgggcccaggccctgcagcctcacgttccccactcatgcccactgaattttccctaagcatagcaaccatacgtgattatcatcccataaaaacagaaacgtttcagagggacatggacaaaaggaccctccttttatactatttaaaaatgcacagtttcattttgtttacataaatgagatcagactatacacaatgtacaacaaccttttttttttttcacttgatggcagggcgtgtagatttttctttttttttttgagacgaagttttgctcttgttacccaggctggagtgaaatggtgccatcccggctcactgcaacctctatctcccgggttcaagcgattctcctcgaatccgaagtagctgggattacaggcatgcgccaccaggccctgctaattttttgtatttaatagagacaggatttctccatgttggtcagggtggtctcgaactcttgacctcaggtgatccgccctccttggcttcccaaagtgctgggatcacaggtgtgaaccactgcgccaggccaagaacttatttttgtgtaggtgtgaagtaggcatcttacttaaatattttggctccaaatgaatgtcttagtgttacgtagtgagtaatccatcctgccacgctgtttggaaaggccaccttatctgtcccttctttctaaggtgatgctctgagctcctaaggcagacttgggggctagagtctgtgccatcagcagtgaggggcttccacgacatctcacaggtcagaggttgcgtttacaggagcagagtccggggctgggaaaggcctggtctgctctgcctcccctgggctgccatgctgaacctgggcctccaactcagagtgctggatacaagtgttcccagaggagaggtccagataggaggtggcctcaacaaggactgcagtatttgacctgggggagaggctctgggaccaccactgacatcttcatgtctctaaaggctctcagggacaaggagtgtggacttgtcctggggaccctagggcagagccaggaccactagtggaaagtagagaagaccaaagaagaggtattccctacaggcagtgagtctccataggcctcttgaggcagtaaggagtttcccattcccaaaggcattcaagaagacactgatcaggaacctctttgagggagcttaagtttggggtgggggttggactcgatggcctgagggaggctgggatgatctgattttggctcatcagtctcagggatacttgaacttatttttattttattttattttatattttgagacagagtcttgctctgtcacccaggttggagtgcaatggcgtgatctcagctcactgcaacttctgcttcctggggttcaagcagttctcccacctcagcctcccaagtagctgggattacaggcacccaccaccatgcctggctaatttttgtatttttgtagagaaggagtttcaccacgttggccaagctggtcttgaactccagacttcaagtgatccacctgcctcggcctcccagagtgctgggattacaggcgtgagccactacacccggcctatttgaactttatcaaagtctctggatatgagacatttgccccaaagcatacttgtaatgatggcatgaggcactgggccctcctggggcaggaagggcctcctagttccctgcctccctgccgccctgcctgacccagggctggaaacgtgagaagtgaggacccagaggctctttcctgcctgccctgagcccctcatgcccaggctctgcctaagccaactacttcccattactgtgggctctcgggagggagttattagacacaacgggcagtgcggtgggccattaagtgagcacttaagagcttgtccagtttcaccccattcactgcacctctggggacactgaggccaagagggcaggtccctccgtgagccgcggcagtgctgggaccagccccaggctatggctgccggctggctcagacctcccatctcacctgctccgtgggctgaggactgtgcgggccacatggctgtgaggggcaccacgggctggtgtgggcgtgcgaggagttcctgctgcaggagggaacctcacttctctccccaccccctagaatcgccacgacatgctcttggtggagccgctgaaccgactcctgcaggacaagtgggacagattcgtcaagcgcatcttctacttcaacttcctggtctactgcctgtacatgatcatcttcaccatggctgcctactacaggcccgtggatggcttggtgcggccagaggctcaggcctcgtgggcgagggtgtgggtggtggggaaggggtgtggacatttcgggagacctccccgaccccaggcccaggctctgccctggactccttcccagcttgcgggagcgatggatggagaacgtggagaacctcgtatccctgcgcccatctcccctgcctcaggctgtacaggagacccgcccccttcccgcttctcagttcctctcctttaaccttgaggtcctgtggggctgagtgtgtggtgactcaggtccctgattgtagacggggtgtactcggttagaaagcatgcaggggccgggcatggtggctcatgcctgtaatcccagcactttgggaggctgaggtgggcagatcacctgaggtctggagtttgagaccagcctgaccaacatggtgaaaccccgtctctactaaaaacaccaaattaactgggtgtggtggagcctgcctgtaatcccagctactcagggaggctgagacaggagaatcgcttaaaccttggaggcagaggttgtgatgagctgagatggcaccactgcactccaggctggtcaacaagagtgaaactctgtctcaaaaaaaaaaaaagaaaaatcacgcaggaatttgggctcgggacagggctcacccctggcctgggggtccccagggatgtgggctggtgtctaagcccagagcccaccatcatcctgcttgcctgccctctttcattcactcacttgctcattattcattccctggatttagacttttgagcagctctgtgccaggccctgggccatccatcaaatcagcctaagaccagcctttttcctctgccaagagccaagacttcatcaaacttctggacttagtccttcgtgtctgatacccaggacacttaatttgctgcttttgtttccagggcactttacaagtttacttacttacttaatttttgtttttttgagatggagtctcgctctatcacccaggctggagtgcagtggcgcaatctctgctcactgcaacctccacctcccgggttcaagtgactcttctgcctcggcctcccgaatagctgggactacaggcacccaccaacatgccaagcttatttttatatttttagtagagatgggatttcaccgtattggccaggctagtcttgaactcctgacctcaagtgatcgcctgcctcggcctcccaaagtgcttggattacaggtgtgagccaccgtgcccggctgcacatttactttaaaaactcaacttcataattgcatgaaacccgatttctgtccacctattaaggccacataatgacttccttttttttttattttattttttttttttttgagacagagtctctctctgttttccaggctggagtgcagtggtgtgatctcagctcactgcaagctctgcctcctgggttcacgccattctcctgcctcagcctccctctttttttttgttttttgttttttgttttttgagacagagtctcgctctgttgcccaggctggagtgcagtggcgccaccttggctcaccgcaacctctggctccggggttcaagtgattcttctgtctcccaagtagctgggattacagccatgagctaccacgcctggctaattttgtatttttagtagagatggggtttctccatgttggtcaggctggtctcgaactctcgacctcaggtgatccgcccgcctcggcctcccaaagtgctgggattacaggcgtgagccactgcacccggccagtgacttctttttaagagaaaaatgtgctggtaaggcaagctgatgaactagtgcttaggaaatgtggatggtgacccactccaggaaatggccactgaaatacaagggtgacacccacaagtgtgtgtggcacagtctctccctccatggtcagtgggagtccctgacactcgtgggagactggccatgggctggggtggcagcgggatgtgtatggcgtggggtccatgagagtgcttccacctctccatcaccctgctgtccatcactctgctcccagccaggaggagctctgggcctgccgggacattgcttgggaggcggcacagcattgtaagatgctccgcttggcacctgcaggctgccactttggggaatcaggcccacagaggggcctccttgcgggcgctcccctaataacacactgtctttgtgtgtccttcccctgatggaggctgtgcctcctgggcagggactatggcttcatggacctggtccatgtttgttgaatgaacgaatgagtaaatggagttaccaacttctctgcatctcacagcctccctttaagatggaaaaaactggagactatttccgagttactggagagatcctgtctgtgttaggaggagtctacttctttttccgaggggtaagcgttccttcccacattgtgagtttccattatcaccaaaacaaaaagccaagaagatccctcagcgctcactcactttttaattcatcagacacatcatagccctacttggggagctgagagacgcagaggtgaagatgagagcccttcagtcagtcaccgcggggcgggagggtgctcagggcgtctccacaggcccaaggcaggcaagcttgaaagtagacactccagccactccacggaacggagtatttgattacaggggcagagtggaggcctcttaagtgataggatcatgactggtagttttttaattaaaccaatctgttaaagctctgagcagtgaaggaaatctccttgcatactggaatcttttttttttttttttgaggtggagtttcgctttgtcatctaggctggaggctagtggcacgatctcggctcactgcaacctccgcctcttgggttcaaaaaattctcctgagtagctgggattacaggcgcctgccaccacagccggctaatttttttgtatttttagtagaggtggggtttcaccatgttggccaggctggtctcgaactcctgacctcaggtgatccacctgcctcagcctcccaaagtgctgggattacaggcgtgagccaccacaccagcaaggaattgttttatttttaacctgaaactcaaacatgtgcaatccttggccattttttttttttttaatgcaggagtaatcttttctttgaatgtgggactcactgtttcagattttacatcacctttcttgcaaaaaccatatttatataatctaagatttctagtttcagcttctttaaagaagagtgagaacttagctgcgtacaaaaaagtctgaatgtagaatttgagatgatcattggtttttgtttttgttttttttgactctggaaacccttgtagtattttaattttaatttttataagatggggtcttgctgtgtcacccaggctggagtgcagtggcgtgatcgtggctcacttcaacctctgtctcctgggctcaagcaatcctcccacctcagcctctggagtagctggaactacaggaagccatcaccatgcccaggctccactgtgatttttttttttttttttttttttttgagatggagtctcactctttcgcccaggctggagtgcagtggcacaatctccactcactgcaagctccgcctcctgggttcacgccattctcctgcctcagcctcccgagtagctgggactacaggcacccgccaccacgcccggctaattttttgtatttttagtagagacggggtttcaccgtgttagccaggatggtctcgatctcctgacctcgtgatccgcccaccttggcctcccaaagtgctgggattacaggtgtgagccactgtgcctggccccattgtgatttttttttttttctgagatggagtctcgcttagttgcccaggctggagtgcagtggtgtgatcttggctcactgcaacctccacctcctgggttcaagtgattctcctgcctcagcctcccgagtagctgggactacaggtgcgtgccaccgcgcccggctaatttttgtatttttagtagagacggggtttcaccatgttaaccaggatggtctcggtctcctgacctcgtgatccgcccgcctcggcctcccaaagtgctgggattacaggcgtgagccactgtgcccagccttctattgtgatttttatcccctagtcttttttggtataagctctatccagttttttttttcagtcactcacctttatggaattgttcagtcattgaacttcgtcttcacagagacaactgtctttcttttcacactcatggtttacattacagtaaagtacagtgccacagtagcaagtgtggctggaatggcaaaagcaggattggcctgtgggagggagcagaagggtggtggtgtcttggacaggactcatggctgacagtggcggcttgttacaagaatttttattttaacgcttacttaaaattaagaaaaaaatatgctcggcatgtgaaaaattaagaaaaaggtggctcacgcttgtaatcccagctacttgggaggctgaggccaggagtttgagaccagcttgggcaacatagtgagactctgatctcttaaaaaaaaattaggaaaaagctccaattagaagaaaacaatttgcccaattcaatacagcaactgataacattttaatgattttccttcctgtctgtacttctgggtatagttgtaaatccactgtgtaatttttttttttttttttgagatggagtctcgctgtcacccaggctggagtgcaatggcctgatcttggctcactgcagcctctgcctcctgggttcaagcgattttcttgcctcagcctcatgagtagctgggattacaggtgcccgccaccacgcgcagctaattgttttgtatttttagtagagacgggatttcaccatgttggccaggctggtctcgaactcctaacctcaggtgatccacccgccttggcctcccaaagtgctgggatgacaggcgtgagccaccatgcccggcttccactgtgtatttttaaccatctctactgactgggccacctagtgtcaccccattggcctgacccttgctgttctgctcttttcacaatctgtgctttcacacattcgaccaccccatcatggtgccatttaggaagcatctgagtgctcaccatttagccacatcgagcattgcctgggatcttactctctctgtttacctgcagattcagtatttcctgcagaggcggccgtcgatgaagaccctgtttgtggacagctacagtgagatgcttttgtaagtgacactttgactcattcccagtccagtccccaggtgaccgcaatcagttctcacttgaggtctcactcacgccgggcctggcacatagtgggacctcagtgaacatgctgagggaatgacggaaggcactgaatacatactcgggggatgaatgaatactgagggcctgctctgtgccaggggccagggatcgagaaactgccgtgacttacagtccgagtgagacggaccttgttcaccttcccactcattgtccatccatctgccattcgaggggttggccctggaatactggatgaaacagacatggcgcccgcctttggggagtttcctatctttaacggggggttgtgcgaccttggcactgttgatattttggactgggtagtgcttagttgtggtggttggggggcggggcggggcgggggctgccctgtgcatcgtagagtatatagcagcatcaccggcctctactcgcagctgcctggagcttccccatcccccagtcgcctggagcttccccatcccccagtcttgacaatcaagaacatttccagatatggccaaaggcccctcacttgttttggggggtggtgccggaatcactcccggttgagaaccaccgctttaggaggaagcagatgagtgaaagcacagttatagaacagtttggatggccgggcgcagtggctcacgcctgtaatcccagcactttgggaggctgaggcgggtggatcacttgaggtcatgagttcaagaccagactggccaacatggtgaaaccccgtctctactaaaaatacaaaaattaggcaggcatggtggcacgcacctgtaatcccagctactcgggaggctgaggtgggagaattgtttgtacccgggagacagaggttgcagtgagcccagatcgcgccattgcattccagcctaggtaacagagcgagattccatctctaaataaataaatagaacattgtggatgtggcaggaaacctccttccttcagaaagtaagccagagcctcaagccccagtgtgcaccgagggccttccaggacctgtctcctgggatctcggctcacagtccccgtcctgatctcttccttcctggaagaacaaggaataatttcaaatcctcttgcagctagcttgtccgtacgactcacaaaccgcatcctttaacccaatttttttttttggacaagtaaaactagaattagctttatttaacatgattgtgaaaggaacacttattttaatttttttaaaagaatttagatttcagggtacttgtgcaggtttgttaggtgggtatattgtatgatgctgaggtctgggggtctaatgatctggtcacccaagtagtgaacatagtacctgataggtagtttttcaacccttgtccccctcccggcttccccacttttggaatcctaagtgtttgttgttcccgtctttgtgcttgtgggtgcccagtgttttgctccacttataagtaagaacatgtgggatttggttttctgtttctgtgttaatttgcttaggataatggcctccagctacatccatgttgctgcaaaggacgtgatttcattcttttttatggctgcatagtattccatggtatatacgtaccactttttgattatccagtctaccattgatgggcacctggattgattccatgctttgctattgtgaatagtgctttgataaacacaggagtgcaggcatctttttggtagaatgggttcttttcctctgttttccccctaatcttgagatacctatactttagccccgaaaggcaaactcaagaggcaaggtctgtaggtttaccacactgatttacctgcctaagagaagcagttttctacatagcattgtgattctcctgcctcagtgtccccagtagctgggattagaggggtgcaccttgcccaggtaattttcatatttttagtagagacagggtttcactgtgttggccaggctggtcttgaactcctgacctcaagtgatctgcctcccaaagttctgggatgacaggtgtgagccatcacgcctggccactatatatccttttatgtactttttatttatttatttatttgtttatttatttgtttatttatttatttgagacggagtctcgctctgtctcccaggctggagtgcagtggcatgatcttggctcactgtaacctccgcctcccgggttcaggtgattctcctgcctcagcctcctgagtagctgggattacaggcgtgcaccaccatgcctggctaaatttttttttgtatttttagtagaggtggggcttcaccatgttggtcaggctggcctcgaactcctgaccttgtgctccgcatgcctcagcctcccaaagagctgggattaaaggcgtgagctactgcgcctggcctttaggtactatatttatatctgtgctttatacataaagagtgagattttgcacagctcctcaccaagccaatttctgctccttggggacgatgctgcttccacggagaacgcctgggctgaaagagtcaggacagcccaaccctagctcctattgcggcctgcagtctggacctctgagcggcctgtgaccttttgttctgggggtgccaggcctcctgggttcccgtagacggagctttctgcccctccacccgcagctttctgcagtcactgttcatgctggccaccgtggtgctgtacttcagccacctcaaggagtatgtggcttccatggtattctccctggccttgggctggaccaacatgctctactacacccgcggtttccagcagatgggcatctatgccgtcatgatagagaaggtgggttccctgggccccagtgggtctcctcagagcccgcttacctcgtggtcatgtgagatggggccaagaactccgcccatcctctctgtcgtgcctgggaaggggctggtttaccccccagcctattttccaagaatcaagcaatctggccctgacccaggtatgtgtaggggggtcccctgaaacctgaccccccctgcacaccaggcctccatctcccgaccagaacaaaggctatgggggaagggtgggtgactccctcatgacccctgagctgagaaccagcaaagcaaaccgccctgcacgttctcaagacgcatccccaggccgatgcggcccggcccttccctcagctcctcctgggcctggcctcggctctgatgagcctgctgtctcctgcagatgatcctgagagacctgtgccgtttcatgtttgtctacatcgtcttcttgttcgggttttccacaggtaatgagcttggtcagcgctgggggagggcaggggtcctgcttggctgagccttctgaagactctgccaggagctgaatgagaaggcactgggtaggcaggtgcatgtctgcaggtgactgagagggtggacagaggacacactgaaatgagctccaggacttggccacgtgttatataaaatgctttaagaattttccaggctggaagtgctgtggctgccacatagcattttggctcagttgttttttcaacttttttttttttttttttttttgagatggagtctcactctgtcgccaaggctggagtgcagtggcacgaccttggctcactgcaacctctgcctcctgggttcaagcaattctcctacctcagcctcccaagtagctgggattacaggcgcccacgaccatgcccggctagtttttatgcatatatatatatatatatatattttttttttttttttctcatacagagtctagctctcttgcccaggctggcgtgcagtggcgcgatctcggctcactggaggctccgcctcccgggttcacgccattctcctgcctcagcctcccgagtacctgggactacaagtgcctgctaccacgcctggctaattttttgtatttttagtagagatggggtttcaccatgttagccaggatggtctcgatctcctgacctcgtgatccgcctgcctcggcctcccaaagtgctgggattacaggcatgagccactgcacctggctagttgttatatttttaatagagatggggttttaccatattggccaggctggtctcaaactcctgacctgaggtgatccacccaccttggcctcccaaagtgctgggattacaggcatgagccacagtgcctggccattaattattttttgagacagagtctcatgctgttgcccaggctggagtgcagtggcgccatctcagctcactacaacctccacttccagggttcaagtgattcttgtgcctcagcctccccagtagctgggattacagatgcccgccaccacacctggctattttttttttttgtatttttagtagagacggggttttgtcatgttggtcttgagctcctgacctcaagtgatctgcccgcctcggctcccaaagtgctaggatgacagggtgagccaccgcgcctgaccttagtcttctttaatccagggcacttcctgcatcattccttgtcatttgcgacctcagaatttgtaatgagtagaggccagtggttttgacaatgtttctcaatttgggtgtgtctgatgtttcctcacgattatagccaggcatgcatttttggccagaatatcaagaagccatgtgtgtcttctgctgtgtgttttattgggagtcacatgatgtccgtctcacttctggtgacgttagctttgatgacttggttttggtggatctgccagacttttccactgtaaagctactatatttacctttgtgatggatacttttcaaggagatgctttgaaactatgtgactagcctgtttctcatcagactttcaccaggagttctagcatccgttgatgagtcttacctgaatcacttcatcctgtgatggtggccaaatgatgattttttttttttttcttgagaaggagtctctgtctgtcgcccaggctggcatgcagtggtgccatctctgctcactgcaacctcggcctcccaggttcaagcaattctcctgcctcagccttccaggtagctgggatcacagctgcccatcatcacgcccggctaatttttatatttttagtacagatggggttttaccatgttactcaggctggtctcaaactcctgacctcaggtgatccgcctgccttggcctcccgaagtgctgggattacaggcatgagccaccacacccagagaagatgatcttctaactccatcattgcttctgcatttattacctggcattctgttatagagaagagctaaccattccccatttctatgtatttgtttgtatcagaatggcctcatggagtcttttgttttcatggattctcactttgttaaatgggttataatccttactatcctcttttattttaatactcaaattgtctgagattagtcactggagtcccttccagctggctcctgtgctcttttcacatgtccacatcttttttttttttttttttttttgagatagagtctcgttctgtcgcccaggctggagtgcagtggcgcgatctgcaaactctgcctcccaggttcaagcaattctcctgcctcagcctcccaagtagctaggataatcccaacctggctatttttagtagagacgggtttcaccctgttggccaggctggtctcaaactcctgacctcaggtgatccgcctgcctcagcctcccaaagtgctgggattacaggcgtgagccaccatgcccggcctccacatcattttttgagcactggactctgctttgatgctcatccgagtcccacagttacgtggttcacatggtgcaccctccctgtccccaccctgccgtttgcgttggaatccctggctgggagggatgggcacctgtgactaagagagacctaataggtgtgggctctggcacctggatctgaaggccctgcatttcagtaggtacaggaagggactaggccgggggggtttgtggatactgataggcagcaaccacgatgcacagctgctgcagaggctctcaggctctgggccacacttcccacagaagcaggcagcatgtggggagaggtcattctgctctgagcggctcagtgctcatggagcaaaatggacctctgagggatgcaggccaacagggtgtgatggacaaagcaggtgtggggccagagctgacacgtatggttaagcaggttgtgcactgtacaaaggtggctgtattcacattgcacatagagacttatatatttatttatttttctagcagatgatgataaagttcttaaaaatatactatgaaaatttttttgatagttttaaagaagggatgctttaaaaataacttgtcacaaagttatttgagactgactgagcaggagggtgtatgtcaggggacttgggatattggcttctatccagtggcaccccgccctccctgtgccctgtagcggtggtgacgctgattgaagacgggaagaatgactccctgccgtctgagtccacgtcgcacaggtggcgggggcctgcctgcaggccccccgatagctcctacaacagcctgtactccacctgcctggagctgttcaagttcaccatcggcatgggcgacctggagttcactgagaactatgacttcaaggctgtcttcatcatcctgctgctggcctatgtaattctcacctacatcctcctgctcaacatgctcatcgccctcatgggtgagactgtcaacaagatcgcacaggagagcaagaacatctggaagctgcaggtgggtgggtggagttggggggtggtgagtggcgcggagagtgtgggcggctctgtctgctgtcttacacagctggctgcaggtgggtgggtggtgggggcggtgtgtggccaggagggtatgggcctctctatccgctgccttacccagctgggcacatgagccctgcaggatttgaggagggagcagaaagcccggccaggcccggggatccagcctcagcacctccctcagtggacttccagcaagttcccctgcccagcacctgctcaggggcagatgagctcagctggtgtttatagacaccgtgcttggctgtggtctgggtggtcctggagggaagaagggggagggctcagcccgacagggtgtccacctcagaggagcctggtgtaaggtgggcaccagaggccagactcaggggagcagctaccatgaggcagggccctgacagctacatttctggccccgtgggccacatctgcatccccaactactaataataagtttcgttcttatgaagaagcactttctctgtgatagggactgtactaagtgtctgtctcacctgatctcatttaatcctcacaacagtcctgtgaagtggattctattactgttcctttttttttttttttttttttttttctgagatggagtcttactctgtcacccaggctggagtgcattggcatgatcttggctgactgcaacctctgcctcccgacttcaagcggttcttctgcctcagcctccctagtagctgggattgcaggcacccaccaccacacccagctaatttttgtatttttagtagagatggggtttcaccatgttggccaggctggttttgaactcctgacctcaggtgatctgcctgccttggcctcccaaagtgctgggatcacaggcgtgagccactgtgcctggctatactgttccgtttttgaatgaatgaggcactgaggcgtagtgaagttaggtatctgtgctcaaggccacatggctggtaagtggcagagccaggacctggcccaggcagtctcactcgtggccctgctctcagccctaccctatgttgccccttgtgagctcctcagggcagggtctggggcctccgtatcactcccggggctgccctgcccaggcccggcaggcaccagtggcacctggacaggtctgggctggctgggctgtgccccttgtatacagtgtacccccgccaggctacagaaacaaagctagcgtggagggcactggacaaccaccctggaggcatctaggcctgggagagcccctggggagctggatactggcagccagggtggccccgggatgcaccctctgcccctcagctcctctgcccttggtgtcttcctgcagagagccatcaccatcctggacacggagaagagcttccttaagtgcatgaggaaggccttccgctcaggcaagctgctgcaggtggggtacacacctgatggcaaggacgactaccggtggtgcttcaggtaatgcccaggctccacctgaatcagggcttgggagctttggggctcacctgtggacacagagcctgcctcagggcctccatgaggggctggtcatgagcacagggggctctcccaatgccagctgtagggattggggccgtcctgagctcagctgtgggcgtgcacaggggaccatcttagatctcatctggtggggcccagacactaaattctggaaaattcgaggtgtccagaaggggccgtctagtgagcagcgtcagagcctggcatccaatatgtgaagtccccctgggcctcacagtgtgctcagagatcacatctttgaggatggtgtccaaaaatcaagtcctctctgccctccccgacccaccacatctccatcctgatgggtgggtttcttgggcttggcctgtgggcagagcccttggcccgggaagctgggcacagctctcaggctctcccgaccccttaccctgcagggtggacgaggtgaactggaccacctggaacaccaacgtgggcatcatcaacgaagacccgggcaactgtgagggcgtcaagcgcaccctgagcttctccctgcggtcaagcagaggtgaggcgtgagggccggtgcttggcgcctccttggctggtggcctgatgttgggcagggggagctttgcaggttccccacgccttgccgggttcctcatccccccaggacccgggcgctgtggcagctcctgacgtcggccatgagcacatagtcacgggctgacttgagcacctcactcatgctgtcacggctgacggctgatggctgacggctcactgggcccgtgcaggcggctgtgccagcacctccagcccaggcacctgtcctcagcgccccaggggacgcagcccagccccgccctgcctccttgtatgggctgccctgcctcctcagccctgttcctcactctgcacgtgtgcatgcgacgtcctagctctgagaggctgtgcggacacaaacaggcagacgggaacacttgtcactcatggacacatctgggcaggtggagaagaggggagggtgagaagaagaaaggggatgccttgagcagaaaaaccccaaggaggccgggcacagtggctcacgcctgtcatcccagcactttgggaggctgagacgggtggatcacctgaggccgggagtttgagaccagcttggccaacatcgtgaaaccccatctctactaaaaaaaatacaaaaattagccaggcatggtggcaggcacctgtaatcccagctactcgggaggctgaagcaggagaatcggttgaacctgggaggcggaggttgcagtgagccgagatcgcaccactacactccagccggggcaacagaacgagactctgtctcaaaaaaaagaacaaatagaaaaaccctgagaaaaattactaccagaaagaaagctgtttaacagttactggtaaacatttaatagaaaacattaaataaatgtctaattgaggacgtttacctagaaatgaaagaggcatagtttatagtggacaaattttgagttataattacaaccctgaacactttgtttttgaattactttgtatttaattgtaaaaaattgtggtaaaatatctatctcctaaaacttgccatttaaatccttttgaagtgtacagtttagtgtcattaagtacatttacattattgtacaacactcaccactatctatttccagaacttttttttttttttttcctgagatggagtctcactctgttgcccaggctggagtgcagtggcgtgatctgggtttactgcaccctccgcctcccgggttcaagcgattctcctgcctcagtctcccgagtagctgggattacaggtgcctgccaccacgcccggctcatttttgtatttttatagtagaaacgggttttcaccatgttggccaggttggtctcctgacctcaggtcatcccaaagtgctgggatgacaggtgtgagccaccatgccgggcctttttccagaacattttaatcatcccacacggaaactctgtgcccttaaaacaactccatgacccctccttcctgaccgcttggcccctcctccctgaccgcttggcccctcctccctgaccgcttggcccctcctccctgaccccttggcccctcctccctgaccccttggcccctcctccctgaccacttggcccctggcccctaaccccttggcccctattctgttttctatctttatgaaagtgggacagagacgttaaaggttgagtagtactgggggcctcagaggcccagagaccttcttaacaccctttaaatactctgagccactctctgatcaccctcatgcagtcacaccatgagctagcacagctcagctcttagcaaggacctgtggggaactcatctgccccaaagacttctgggcttccacccccatgaatccttcctcctcttcccctgtgctctgatccacagattctagctgcttccgctgcccagcttttgatttcttcttctttaactcaaaggcaattccatgctcttcttagactgcagctcaccgcgttgtagttggggaaatgtccctaggcagaaagttagggagatcacagggctccccttgtgaatttcacttctcttgggaattgcagtttttatttattttattttatttttgagatggagtcttgctgtgttgcccaggctggagtgcagtggcacgatcttggctcactgcaacctccgccttctgggttcaagtgatcctcccacctcagcctcctgagtacctgggactacaggcgcctgccactatacccggctaatttttttttttattatactttaagttctagggtacatgtgcacaacgtgcaggtttgttacatatgtatacatgtgccatgttggtgtgctgcacccattaactcgtcatttacattaggtatatcttctaatgctgtccctccccactcccccaaccccacaacaggccccggtgtgtgatgtcccccttcctgtgtctgagtgttctcattgttcaattcccacctatgagtgagaacatgtggtgtttcgttttttgtccttgcaatagtttgctgagaatgatggtttccagcttcacccatgtccctacaaaggacatgaactcatcattttgttatggctgcatagtattccacggtgtatatgtgtacacctggctaatttttgtatttttagtagagacagggcttcaccgtgttggccaggctggtctcgaactcctgatctcaggtgatctgcgcaccttggtctcccaaagtgttgggatgacaggtgcgagccaccgtgccttgcctttttttaatgtttaattttaaaaaatctttagctgctaagttggtgttatttgagggactgccgtttttcactgcctgatgtcctatctctgaaaaacgtttgctgcctgtatgttgcctattttgtgatcgttgacagcacgatggctagcccagtactagatactccattatagctggaagcgaaaatctattttatcaaaggctcatttttagaaaactgctcgagggttccattggtttttccacaggcctcctgcgatcgtgtgattttcctgtgagtttagttggaagcaatccctgcatcctgtaataatgcttattgatgatctctttgtcagttgttaactggtctaactttgccagagagctattgaaagatagctttgcgtgtgatttgagtagtttttcttttcttttcttttttttttttttttgagacggagtctggctctgtcacccaggctggagtgcagtggcgcaatcttggctcactgcaagctccacctcccgggttcacgccattctcctgcttcagcctcccgagtagctgggactacaggcgcccgccactacgcccggctaattttttgtatttttagtagagacggggtttcaccatgttagccaggatggtctcgatctcctgacctcgtgatccgcccgcctcggcctcccacagtgctgggattacaggcgtgagccaccgcgcccggccttgagtagtttttcaatgtcactcttgttgatttagtgacatcctacatctttgacaagatttgctatttcacttggcagttgatttgtattatgtttgcatgacagtgttggcggtttacaacactgcacattcactgtgatatttataaagacattgacccagtggcaggggtatacacacccatgttaactggggcagggatgggggatggttggaggttgcctgatgtcacctttataatttttttcttttttttttttttgagacagaatcttgttctgtcgcccaggctgtcacccagtgggcctggaccccagatcctgcctctttggctggtgctcgtcacccagagctgccctggtgttgagccactcacaggacaggcctcggcgttgctctgtggagaccctctctccctcccgctggggcagggaggagatggaggccgagaggggcaggcgatgggctctcctgaggctgcaagcaagtcggggtgggatggaggaagagaatttaaggaacagcgagagtgcatgaggctctttgagtagttgagggaggaggacattgcaccgatccaggtgcctcaggaagcactcgcatgcctgggcctcgttttttctttctttctttcttcttcttcttcttttttttttttttttttttttgagacggagttttgctcttttcgcccaggctggagtgcagtggcacgatctcggctcactgcagcctgtgcctcccaggttcaagtgattctcctgcctcagcctcccaagtactggggttacaggcatgtgccactatgcccggccaatttttttttttttttttgtatttttagtagagatggggtttcaccatgttgtccgggctggtcttgaactcctgacctcaggtgatccacctgcctcggcctcccaaagtgctgggattacaggcatgagccatcgtgcctgtcttggacctccttttatctggagacttgggaggccaagaagtgaatgtttgttttgttgcatccaaggtagtaatagtgttacccttcagtttcaggcagacactggaagaactttgccctggtcccccttttaagagaggcaagtgctcgagataggcagtctgctcagcccgaggaagtttatctgcgacagttttcagggtctctgaagccagaggacgctgaggtcttcaagagtcctgccgcttccggggagaagtgaggacgtcacgcagacagcactgtcaacactgggccttaggagaccccgttgccacggggggctgctgagggaacaccagtgctctgtcagcagcctggcctggtctgtgcctgcccagcatgttcccaaatctgtgctggacaagctgtgggaagcgttcttggaagcatggggagtgatgtacatccaaccgtcactgtccccaagtgaatctcctaacagactttcaggtttttactcactttactaaacagtttggatggtcagtctctactgggacatgttaggcccttgttttctttgattttattcttttttttgagacagaatttcactcttctcacccaggctggaatgcagtggcacaattttggctccctgcaacctccgcctcctggattccagcaattctcctgcctcggcttcccaagtagctgggattacaggcacgtgccaccatgtctggctaattttttgtatttttttaatagatatggggtttcgccatgttggccaggctggtctcgaactcctgacctcaggtgatccgcccacctcggcctcccaaagtgctgggattacaggtgtgagcctccacacctggctgttttctttgattttattctttttttttttttctgtgagacagagtttcactcttgttgcccaggctggagtgcagtggtgtgatcttggctcactgcaacttctgcctcccgggttcaagcgattcttctgcttcagtctcccaagtagcttggattacaggtgagcactaccacgcccggctaatttttgtatttttaatagagacggggtttcaccatgttggccaggctggtctcgaactcttgacctcaggtgatctgcccgccttggcctcccaaagtgctgggattacaggtgtgagccgctgcgctcggccttctttgattttatattattaggagcaaaagtaaatgaagcccaggaaaacacctttgggaacaaactcttcctttgatggaaaatgcagaggcccttcctctctgtgccgtgcttgctcctcttacctgcccgggtggtttgggggtgttggtgtttcctccctggagaagatgggggaggctgtcccactcccagctctggcagaatcaagctgttgcagcagtgccttcttcatccttccttacgatcaatcacagtctccagaagatcagctcaattgctgtgcaggttaaaactacagaaccacatcccaaaggtacctggtaagaatgtttgaaagatcttccatttctaggaaccccagtcctgcttctccgcaatggcacatgcttccactccatccatactggcatcctcaaataaacagatatgtatacatatatatcgtgtcaagtgtaaagtttgtggcaggaaatgggctggcatagctaattggctctgtgtaggctgcttgtggatgcgtgtgtatacacatgggggtgtgtgtgtgggtgtgtgcatgcatgcatgtttgtgtgtgtgtgtgtgtacgtgtgtgtacattcctatggttgcattcctgctataatgcagaagggaatagttgcaacagagaccaaatagtttgcaaagcctaaaatataagcttacctaaaatataaaaagcttacctaaaatataaaaaacatactatctggccctttacagaagagtttgctgactcttcctttgtagaatagagcttaagaaacagatactctactctgctctccctctccctctccctctccctctccctctccctctccccatggtctccctctcccgatggtctccctctccctctctttccacggtctccctctcatgccgagccgaagctggactgtactgctgccatctcggctcactgcaacctccctgcctgattctcctgcctcagcctgcccagtgcctgcgattgcaggcgcgcgccgccacgcctgactggttttcgtatttttttggtggagacgggtttcgctgtgttggccgggctggtctccagctcctaaccgcgagtgatccgccagcctcggcctcccgaggtgccgggattgcagacggtgtctggttcactcagtgctcaatggtgcccaggctggagtgcagtggcgtgatctcggctcactacaacctccacctcccagccgcctgccttggcctcccaaagtgcaaagcttgcagcctctgcctggccgcccatcgtctgggatgtgaggagcccctctgcctggctgccccgtctggaaagtgaggactgtctccgcccggccgcccatcgtctgagatgtggggagcgcctctgccccgccgccccatctgggatgtgaggagcgcctctgcccggccacgaccccgtctgggaggtgaggagcgtctctgcccagccgccccgtctgagaagtgaggagcccctccacccggcagctgcccctactgggaagtgaggagcgtctccgcccggcagccaccccgtccaggaaggaggtgggggtcacccaccgccaggccagccgccccgtccgggaggtgaggggcgcctctgcctggccgcccctactgggaagtgaggagcccctctgcccggccaccaccccgtctgggaggtgtgcccaacagctcattgagaacgggccatgatgacaatggcggttttgtggaatagaaaagggggaaaggtggggaaaagattgagaaatcggatggttgccgtgtctgcgtagaaagaagtagacatgggagacttcattttgttctgtactaagaaaaattcttctgccttgggatcctgttgatctgtgaccttacccccaaccctgtgctctctgaaacatgtgctgtgtccactcagggttaaatggattaagggcggtgcaagatgtgctttgttaaacagatgcttgaaggcagcatgctcgttaagagtcatcaccactccctaatctcaagtacccagagacacaaacactgcggaaggccgcagggtcctctgcctaggaaaaccagagacctttgttcacttgtttatctgctgaccttccctccactatcgtcctatgaccctgccaaatccccctctgtgagaaacacccaagaatgatcaataaaaaaataaattaaaaaaaaaaagataaaaaataaacacattgtgaaaaaaaaaaaagaaacagatactctgaaagagagatctgttccagactgggcaggttgtgttagtatctgcggagtgtagaatgagttgttcagttgtggaattattggatgttggttcatgaaaggatgaactttggctgaggctgaggcttgggccctaccaggagaggtgttttgggagaaaatactgggatccctcctccctgttctctagcatcatgtctgcctccacataggaggcgccacggaggagccccagttgcctgcatgtgactatggcaagtgagcctggagcctggaggagggaggccgacagccgggatgtggggagtgtttatgaaggtgctccatgtgcatctccctttaagtctcctaacagctcgtgaagaagctattattagttcccttttatagatgagaaaatcaaggttccaacagtgagtaaggttgcacagccagtaaacacgttgcctaggtttgaccccaggcagtctgactccaaagcctggctcttaactgctgtgtcaggctgcctggcagagaatgtgctggggcatgccagcctatcctgggccagagggaggtgggagggcttctcgcttcctgctgtgggcctggggctccatgctttacctgtaggcctttcttagaaaatgtgtgggtgtcagacagctgcaaacttctgcaaattggatcagctttttgttttgttttgttttttgagacagagtcttgctctgtcacccaggctggagtgcagtggcatgatctcagctcactgcaacctctgccttctgggttcaagggattcccctgcctcagcctctttagtagctggatgacaggtgcctgccaccacgcctggctaatttttgtagttttagtagaaatggggtttcaccatgttggcggggctggtcttgaactcctgacctcaagtgatccagctgccttggtttcccaaagtactgggattacaggtgtgagccaccgtgcccagcctggatcagctttcaaatttactcagagctggaagggatcctgtggttgtacttttgcaaaactaatgatagaaattttttgttattagattggaaacctgagattgtttaaggaaggatatacctgcaattcatatgtctttcttttttaaaaaattaataagctttattttaattttatttttttgagacagggtcttgctctcttgcccaggtgggagcacagtggtgtggtcatggctcaatgcagcctcaaactcttgagctcgagcgatcctcctgccttagcctcctgagtagctgggtctacaagcgtgagccaccacgcctggcaatttttttttccccgtgcagagatgtggtcttgctatgttgctcaggctggtcttgaactcctggcctcaagcagtcctcccgccttggccccacaaagtactggcattgcggtgccagccacagggcttggccagctttatttttcgagcaactttaggttcacagcaaaattgacacaaaaaatatataggaagttctcatacacctgctgtgcccacaacctccccagctactgccatcctgccccagagtggtacattgttacaatcagtgagttgacattgatacatcattatcatccaaagtccagctcatgcctgtaatcccagtactttgggaggctgaggcgggcggatcacctgaggtcaggagtttgagaccagcctggctaacacggtgaaaccccgtctctactaaaaatacaaaaattagccaggtgtggtgacgcacgtctgtcaccccagctactcgggaggctgaggcaggagaatcacttgaacccgggaggcagaggttgtggtgagccgaggtcatgtcactttactccagtcagggcgacagagtgactccgtctcaaaaaaaaaaaaaaaagaaaccaaaatacaaaaaacaaagtccactggggtcactcttggggttatagattccatgggttttgacaaatgtatgacctgcgtttatcattatagtatcacacagaggaattttattgcctaaaaatcctccatcctccacctattaatccgtccctctctccagctcctggcaacaccgacctttttttttttttgcgacggagtctcgctctgtcacccaggctggagtgcagtggtgtgatcttggctcactgcaagctccatctcccaggttcatgccattctcctgcctcagcctcccgagtagctgggactacaggcacccgccaccacgcctggctaattttttgtatttttagtagagacggggtttcactgtgttagccaggatggtctcgatctcctgacctcgcggtccgcccgcctcggcctcccaacgtgctgagattacaggcgtgagccaccgcgcccggccaacactgaccctttttttttttttttttttctgagacggagttttgctctgtcgcccaggctgaagtgcagtggtgcaatcacggctcactgcagcctcgacctcctgggctcaaagatcctcccacctcagcctcctgagtagctgcgactataggtgagagccaccacgcctggctcatttttgtattttttgtagggatggggtttcgtcatgttgcccaggccaggtcttgagctcctggcctcaagcaatccacctgccttggcctcctcaaatactgggattacagatgtgagccaccgtgcctggccagccactgatcttttactgccttttccagcatgtcatgtagttggcatcatcaatacaatacatagccttttcagattgatttattgtacttagtattatgcattagagtttcctccaggtcttttcgtggcatgagagctcatttcttttattggaggataacattccattctcttggatgtagcactcttttttttttttttttttttttttttttttgagacggagtcttgctctgtcgcccagcctggagtgcagcggtacaacctcggctcactgcaagctccgcctcccaggttcacgccattctcctgcctcagcctcccgagtagctgggactacaggcacccaccaccatgcccagcaaatttttttgtattttttgtagagatggggtttcgtcatgttgcccaggccaggtcttgaactgctggcctcaagcaatccacctgccttcgcctcccaaagtgctgggattacaggcgtgagccaccacgcctggccggatgtaccactctttatccattcacctactgaaggacattttggttgcttccaagttttggcaattataagtaaagttgctataaatatctatgggcaatttttgtgtgggcataagttttcagcttctttgaataaacaccaaagagtgtgattgctggattgaatggtaagagtatgtttagttttgtaagaaaccaccaaagtgtctttcaaagtggctgcaccgttttacattcccaccagtgatggccgagagttcctgttgctccatgtcctcaccagcatttgctggtgctgtcaacattttggatttgggccattctaaagagtatgaagtggtcattttatcttttatctttttttctgtttctctctgtgtgtgtgtgtgtgtttaatttaaacttaatagcattgaccaatgtgttgtatgcatttacactatagcatgttatatttttgttctgatcatattccttttcacttttccattctttttcttttttctttctttcttttttttttttttttttggaaacggagtctcgctctgttgcccaggctgtacagtggtgcagtctcggctcactgcaacctctgcctcctaggttcaagcaattctcctgcctcagcctcccgaatagctgggactacagtgtgcagcacctcaccccgctaattttgtatttttagtagagacggggtttcaccatgttgtggcctcttccctccttccaagtccaggcagatgctccctctttcccgaactcatcccctacaccccatcacagggacttcctcccgccttgggggtctcagcccattttgtcctgatgacccacatggtgggtcatggttcctgcctgagcctgtgtcccctgtggcccacgagggtggacacggccttctccagttctgaatccctcgttgtccacctgcgcccttgccacggcctctcccgtgggctctcaccatgtgctgggttaaatggggttgaatatagaccatctaaggggctgaagctgctgcttctgtgtgtttggggtgggattaggatgggctcgggcttcctaagtagtgactgtgactccactgggtgacctggctcctgctgcctctcatagcagagcgggggtccccttcttccttgctgggcacagggcacacctctgggtgggagacaggggcctttttcaccagctcccacctgccctctgagaaaagttatgaacacgagcaaaatggaagcactgacatttggcagcagcttcctccccaggcgtctgagccgccagaggcaaacagggagggcgcggggctgggtcgggagagggtgagtaagctagtggccggaggccgtgctcaaccccagatcgggcttttccggtcgagtttcaggcacagtcatgagatttcagattgtgagtgggaacttcaggaccccctgacttcaacggcagaagcggtctcctgcttcacccacaccctcaagtctggtctgccccttaccggccataggtcctgctctcccgtggcctagaagcctcacctgcctcctgcctcctccccaggccag

SEQ ID NO: 4 - DNA, 41480 bp, synthetic construct
  source 1..41480: mol_type = other DNA
taggtagaagtgagtggatcatggaaggcttcgtgtaataggtagaattttaactgatgactacaattgactcagcattattattataattataccctctgtaaattttgccagtcacgtagatttttgtattgggcaaagagaggtaaataggatctaacagatggaaatggaagaagagataatttacagtggcactgttaataaaagcatagagttttttagggaatggtgaataattcatatatgagttttactccttgtgccacctcatgtatttggtcatggcggcaagattcctcttaaatagaatcacaaggctggagtgctctaaataatgagcattatcttttgtggccttgaagtgatagggcttgctgttagttttgtgacattcgtaggagtgagctctataataatgtaagcccagagaggaccaggcatgtcaggccaacaggacaaaccaaaatcaatgccctgctctccttaccctcctcacagtgatatatccagacctccagggccagaaggcatggattaaaaaacaaaaaaaatgtgtgggggttaggggagaagagagaagcaatggaatgcaggcccttctctggagcagcatttttacctgcaaaaggcccacattgggagtaagggagacagttaatctgtgaattaaatcaacattgtaattgtcacataaaaattcagacctaaattctgcatagcttgatatgggtaatcaaaaattcctattcaaattctgtgtcacctagcacctctttgtaacataatatctatagtgtcttgacatttggtttaatactgctgttttaacatcttggtacacatgtgagagaataatacatatcaaccgcagacgttctgaaattgaagaaaattgtcatttccattccaggtatgcaggcacccttgccttattatcaaagacatgtacgattattgctgagagtacagatgcatgaatcagccttaagttgtatctgtaacagtgtatgtattcattttaagagttattggaaacaaatatgataacaatttaatatgtgcttaattttgtggaagatgtctgttaatgcttactacattatcttctagcgtatgtgcctggtttacaaacttccttccagcataacccatgtcctcatttttggtgacttcaatatccatggagataagtccatacaatgaactggcctttcagttggtttttaagtttttactgtgaattaattgtagactacgaagaagttgtgaaagcagtacagagagttcctgtatgcccatcacccgacctacagcaatacttacaagttaaataaatgtattgtcaaaaccaggaaatcgacattgatcccatctaattatctacactgtaaatcttatcagatttcaccaaataactacagcacaatcttaccaaattttaccagtgtttgcatgcactcatttttggagtgagatattcctctatgtttcattccataatattttgtcacaggtgtagattcataaacacaatcacattgaatatagaagtgtttctttaccacagaagaattcccttgggcttctcctactgtcacacacacagtgtgcttcttcccaaatccctctaatcactgatctattcttcatgtctgtaatttcatcattttgaaagggttacataaatggaatcatacagtatctaatcttttgactttggctttttttattcagcataatgtcctcaaaatccacccaacattttccagctatcaatagcttattgctgactttcttatactaccgagtagtgttcaattgtatagatgtactatgctttgtttcactattcacaagtggaaagacattgctgttttttctaacgtggcatttataaataaagcagctatacacgtatgtgtacagacttttttattttattttaagttctgggatacatgtgcataatctgcaggtttctaacataggtatacatctgccatggtggtttgctgcacctatcaacccatcatctaggttttaagccctgcatgcattaggtatatgtcataatgatctccctccccttgatccccaccacccaacaggatgtgttctgtaatgttcccctccctgtgttcaacagttctcatttttcaactcccaattatgagtgagaacgtgcgttgtttggttttctgttcctgtgttaatttgctgaaaataatggcctccagcttcatccgtgtccctgctaaggacgtgaactcattctttcttatgactgcatagtattccatagtgtatatgtgctacattttcttcatccagtctatcattgatgggcatttgggttggttccaagtctttgctattgtaaatagtgctgcaataaacatacatgtgcatgtgtctttatactagaatgatttataatcctgtggatatatatccagtaatgggattgctgggccaaatggtatttctggttctacctccttgagaaatcttctcactgtcttgcacaatggttgaactaatttacactcctacctacagtataaaagctttcctgtttctccacagcctcatcagcatctgttctttcctaactttttttttttttttttttggcgaattttttgtacttttagtagagacagggtttcaccatgttagccaggatggtctcgatctcctgacctcatgatccgcccacctcggcctcccaaagtgctaggattataggcatgagccaccacgcccggcctcctaactttttaataattaccattctgactgttgtgagatggtatctcattgtggtttttatttgcatttctctaatgaccagtgatgatgagctttttttcatatgtttgttggccacataagtgtcttcttttaagaggtgtctgttcacattctttgcccactttttgatgggcaaagaggaactttgtcctcttttaaatttatttaactccctttaagatactggatattaggcctttgtgagatggtgagattgcaaaaattttctaccattctgtaggttgcctgttccctctgatgatagtttcttttgctgtgcagaagctctttaggttacttagatcacatttgtcaattttggctttttttgcaattgctcttggtgttttcatcatgaagtcattgcctatgcctatgtcctgaatgcgattgcctggattttcttctggggtttttttatggttttgggttttacatttaagtgtttaatccatcttgagtttatttttgtacacaatgtaaggaaggggtccaatttttgttttctgcccatggctagccagttatcccagcaccacttattaaatagggaatcctttcaccattgcttatttttgtcaggtttgttgaagatcagatggttgtagatgtgtggtgttatttctgaggtctctgttctgtttcactggtctatgtatctgttttggtagcagtaccatgctgttttggttactgtatccttgtagtatagtttgaagtcaagtagcgtgatgcctccagctttgttccttttccttaggattgtcttggtaatatgggctctttttggttttaaatgaaatgtaaagtagttttttctaattctgtgtagaaagtcaagggtagcttgatgggaatagcactgaaactataaattactttgggtagtatggccattttcatgatactgattcttcatatccatgagaatggaatttttttccatttgtttgtatcctcttttatttccttgaatagtggtttgcaattttccttgaagaggtcattcacatcccttgtatgctgtattcctaggtcttttattctctttgcaacaattgtgagagggagttcactcatgatttggcgctttgcttttctattatcggtgtataggaatgcttgtaatttttgtacattgattttgtatcctgagattttgctgaatttccttatcagctcaaggagttctggggctgagatgatggagttttccaaatatacaatcatgtcatctgcaaagagagacagtttgacttcctgtcttcctatttgaatacccttcatttatctctcttacctgatttccctggccagaactttcaatactgtgttgaataggagtggtgagagggcatttctgtcttgtttccagtttttaaaggaagtgtttccagtttttgcccagtcagtatcatattggctatgggtttatcataattaactctcattattttgagatatgttccatcaatacctagttgattgagagtttttaacatgaagggatgttgaattttatcaaaggctttttctgcatctattgagataatcacatggtgtttgttattggttctgtttatgtgatggattacacttattgatttgcatatgttgaaccagccttgcatcccagggatgaagctgacttgatcgtggtggataagctttttgatgtgctgctggattcggtttgccattattttattgaggatttttacatcgatgttcctcagggttattggcctgaaattttctttttttgttgtgtctctgccaggttttggtatcaggatgaagctggcctcatgagttagggaggagatcttttttttctgttgtttggaatcctttcagaaggagtggtaacagctcctctttgtgcctctggtagaatttgtctgtcaatccatctggtcttgaactttttttcattgataggctattaattattgcttcaatttcagaacttgttattggtctattcagggatttggcttcttcctggtttcatcggaggagggtgtatgtgtccaggaatttatccatttcttctagattttctagttgatttgcttagagatgtttatagtattctctgatggtagttgtatttctgtgggatcagtggtgatatcccctctatcattgtttattgtgtctatttgattcttctctcttcttctttactagtctagctagtggtctatctatcttgttaatgttttgaaaaagccagcttctggattcattgatttttttgaagggtttttcgtgtttctagctccttcagttctgctctgatcttagttatttcttgtcttctgctagcttttgaagttgcttgctcttgcttctctagttttttaaattgtgatgttagggtgttgatttcaagccttttcagctttctgatatgggcatttggtatataaatttctctcttaacactgctttagctgtgtcccatagattctggtacattgtctctttgttctcattgatttcaaagaacgtctttatttctgccttaattttgttatttacccagtagtcattcaggagcaggttgttcaatttccatgtagttgtgtggttttgagtgagtttcttaatcctgagttctaatttgattgtactgcagtcagagagattgtttgttattgtttccaatcttttgtatttgctgaggagtattttacttccagttatgtggtcgatttttagaataagtgctatgtggcactgagaagactgtatattctgttgatttggggtggagagttctgtcgatgtctattaggttcacttggtccagagctgagttcaagtcctgaatatccttgttttctgtctctttgatctaatattgacagtggggtgtaaaagtctcctgctattattatgtgggagtctaagtctctttgtaggtctgtaagaacttgttttatgaatgtgggtgctcctgtattgggtgcatatatatttaggatagttagttcttcttgttgccttgatccctttaccattatgtaatgccctcctttgtcttttttgatcttcattagttaaagactgttttatcagagactaagattgcaaccgctgcttttttttgctttccatttgcttggcaaatatttttccatccctttatcttgagcctatgtgtgtctttgcacgtgagatgagtctcctgaatatagcacacctatgggtcttcactgtttatccaatttgcctgatgctagctgggtattttgcacattagttaatgcagtttcttcatagtgtcattggtctttatattttagcgtgtttttgcagtggctggtaccagtttttcctttctatatttagtgcttccttcaggagctcctgtaaggcaggcctggtgatgacaaaatcccttacaatttgcctgtcgggaaaggattttttttcttctttccttatggagcttagattggctggatatgaaactcacggttgaaaattcttttctttaagaatgttgaatattggcccccactctcttctgccttgtggagttcctgcaaagagttccgctgttattctgatgggcttcccttttaggtagcctgacctttctctcttgctgcctttaacattttttcctttatttcaactttggagaatctaacaattatgtgtcttggggttgctcttcccgaggaatatcttagtgttgttctctctgtttcctaaatttgaatgctggcctgtcttgctaggatggtgaagttctcctggataatatcctgaagtgtatttttgaacttggttccattctccccatcaccttcagttgcaccaatcaattgtaggtttgtctattcacatagtcccatatttcttggaggttttgttcattcattttcattcttttttctctaatctagtcttcatgccttatttcagtaagttgatctccaacctctgatattctttcttctgcttgattgattcagctattgatacttgtgtatacttcacaaagtccttgtgctgtgtttttcagctccatcaggtcacttatgttcctctctgtactggttattctagttagcagttcctgtaaccttttatcaaggttcttagctttcttgcattgggttagaatatgctcctttagctcagaggagtttgttattacccaccttttgaagcctacttctgtcaattcatcagtctcattctccatgcagttttgcgctgttgcttgagaggagttgcgatagtttggaggagaagaggctttctggtttttggaattttcagtatttttgcactgctttcctcatatttctggatttatctacatttgatcttttaggccgataacctttgggtggggtttttgtgtgggggtctttttagttgatgttgatgttattgctttctgtttgctagtttgtcttctaacagtcaggcctctcttctgcaggtcggctgcagtttgctggaggtccaatccagaccctgttcacctgggtatcaccagtggaggctgcagaacagcaaaagatggctgcctgatcctttctctggaagcttcattccagaggggcactggcctgatgccaactagagctctcctgtatgaggtgtctgtccacccctgttaggaggtctctcccagttgggaggcacgggggtcagggacccacttgaggaggcaatctgtcccttagcagagctggtgcactgtgctgggagaaccccccttgtcaggatcagctgctatcttcagaggcagcaggcaggaaagattaaatctgctgcggttgcgcccacagcctccccttcccccacgtgctccatcccagggagataggaattttatctgtaaacccctgactgcgcctgctgtctgtccttcagagatgtcctgcccagtgaggaggaatctagagaagtagtctggccatagctgcttagccgcgctgtggtgaattccgcccagtccaaacctcccagccttcttagcactgtcaggggaaaaccgcctactaaagcctcaggaatggcggatacccctctctccacaaagctcaatcgccccaggtcgacttcagactgctgcgccggcagtgagaatttcaagccagtggttctttgcttgctgggctctgtgggagtgggacccattgaggcaggggaccacttgtctccctggcttcagccccctttccaggggagtgaacggatctgtctcactggagttccaggcaccactggggtatgaaaaaaactcctgcatctaggtcggtctctgcccaaacagctgcccaatattgtgcttgaaacccagagccctggtggtgtaggcacacgagggaattcctgatctgcggatcgcaaaaaccatttcaaaagcgtagtactgggctggtagcagggttcctcacagcttcccttgattgggggacaggtgtcccctggctccttgtacttcgcagatgaagcgatgccccaccctgcttctccttgctctccgtgggttgtacacactgcctaaccagtctcaatgagatgaactgggtacctgagttggaaatgcagaaatcaccagtcttctgcgttggtcccgctgggagctgcagaccagaactgtttttatttggccatcttggcccccctcctgtacagatttttaagtgaacacagtttcccagtttctaggatacattttccaggttctaggatacgctggattgctggattatatgaaaatgcaagaagatttcccagagtagctctactattttactttctcattggcagtgtatgagacctccaattccttcaaatctcagccaatatttgaaactatcagtattttatattttagccatattgagagggtagagtggtatctcgtgacttttatttgttgtcctaaacattagtgatgttgagcatctttttacgtgtttatttgtcatgcatatatgtgtttgctgaagcatctgttcgtcttttaccctgattgaatccagctctccactaactccatgcctgttcccatagaactgagggtggctgcagcacaacacacaaccatgcccagcggtttcactgttcatttatgaccttgaacctgaaatgttcacttatatctcctgaacagtcatgtgacatttccataattgcctctcatctccaaaggaaaaccttcagccatcgtctgtctcctgaaaccacctactctttatttatttttttaatcactgtcaggtgatgctcttctgagaattactcaatctccccagagcgaacctacctccccatgtgcctctgagcacacctctctgcattttctctcatgccaggaaatgggctctgcaaattcctgtttgaaaccaccctttccatttgtgcagtttccccttttgcctccccagaaacattttatagcattattgcctctcccttctacatcttcaatgtttccttctctaatggatccttccattgcaactgaaacaccccatcctatttgtggcataaaacaccatctaagcaaccattcgtctctatccacagcctgatttatcttctttattttagaaaaaaatatcttccaaagagatttctgtactcattatcttcatttcctcacccttcctcatatcttctcatatctctaactccctctcttagctagatcattaaatttatgttttttgtttgaaaatttatttgtgacatggtaataaagtcaaagctttcaaaaataatctttaaatacactcactgaaaactgtcattcccattttaggtcctcaggcatccttgccttgttaacaaagacatatcctattatacttactaataagtgtatattaattcacaaatatttaataataaaacaatatatatatttttcatacaatatatacattggtctgcattctttttaaaaaatctaacaaattctgcagggccttttatatcaggtttgttgctctttctgggtagctacagagtattctattgcatagatagacagtaatttatacagtattgatggccattttggctgttaccagtttttgactgtaaataacactgcatttattaactcagaacatagatcttttgaacatgcacaaatatatctctaagataaattcttagatgaggaattacagagagaaaaggatggtgctttatacatgcttccatatgttgaaaacagccttcactggaagttgtatccatctgcatccccagcagaaatgagtgagggtacctgatcccactccatccccacactgtatgctataaaacttaatggttttttagattttggtaaataaaatataactctgtaatttcaattggcatgtctttcattatgagttgaatttctcctctttccatatgtttaggagccatttttattttttagaaattgtgaatcatgacttaaagttattttcttattacctttttcaattttgaattattaacatcatttagaaaaatttgtatcaatagagaaaatttatactttggctataacatacattaccaaacatctcccagtttatttatttaattttattaatttactaatttatttcttgagatggagtctcgttctgtcacccaagctggagtgcagaggcacagtcttggctcactgcaaatttcgtctactaggttcaatccattctcttgctcagcctctcgagcagctgggattacaagcgtgtcccaccacaacgaattaatttttgtatttttagtagagaccaggtttcaccatggtggccaggctggtctcatactcctgacctcaggtgatctgcctgccttggcctcccaaagtgctgggattacaggggtgaaccaccatgcctggccacagtttatttatatcttgattatgatggttaatgttatgctaaaaaaaataacttttttttttttttgagacaaagtctggctctatcagccaggggagtgcaatggtgtgctgtcagctcactgtaacctccacggcctgggctcaagccatcctgccaccacaacgtcccaggtagctgggactacagacatgcaccaccacaccaggctagtttttgtattttttgtagaaacgggttttcactatgttgcccagaatggtctcaaacttgtaagctcaagcaatccacccacgcagcctcccaaagtgctgggattacaggaatgggccatcacagctagcctttttgtctttataaatattttctttaatatcttctgaattgtatcctataattgaaagtctttttccactttgatttaaaaactatttggctatggcttctccaggtaattgtattttcattataaaattttaagtagtgtatttgcatgtatcctcaaatcatatgtaaagtatgtttccacctttacttatttcacacagaaactcagttgtcccaatcccattcattcaattgtgcctgttttacacactactttgatatacaacctttatcataataggcatacattgaagatattagaagtccacttccactactgcaataaagcaaatattacaataaagtgaatcacatgaatttttggtgtcccggtacatgtaaaatttatgcttacactatactgtactctattgagtctcaatggcattatgtctaaagcaatgtgcatgcattacttaaaaaaatactttttcactaagaaatggtaaccatcatcagaaacttcatcaagccaaacgttttgctgctggagggtcttgcttgatattgatggctgctgaagtggctgctgaaggtaagacaggctgtgccaatatcttaaaacaagacaacagtgaagtctgccacatcaactgactcatccttttatgaaagattttaatgtagcatgcaatgctatttgcatagcattttatacacaatagaacttcttttaaaatgggagtccattctctcaaactgcgccactgtttttatcaaggaagttgaacaagatggaatgtgatgggagaggcttatctctattggatatgggacagaggccaagaatcatctcaggtagggtttgtgtctccaatacctctggccactgatttgtccatagtcctcatacaggaaataacaagtctgtccagcatcttcataagcctggattgctcaccagctttgactccagctcctgtatgcatctcctgaattaagcaacacagaagggttctctgaagtcactgaatcccagaaaggccctccacctttagcacaagggacgtcttcaccactggacaaaggagaaaaagataagggtaagtaccaagatttgtcttcttccatagtcagtcatggtttttgctataagatcgtttctgtttccacctaggtgctacaggcaggggatcatgagcttgtttcaggaaaagacaggggacatgaagtttccttctggaaactgagtgctgccaacccagactgtgtgagtttcaactggagtccccccatttgatttatctgtccatatcacctcccttattccaatcactgaacctgtcctcttagagaaaatgctgcctctcacattcatttaaggagctagaggacatgcaagcattgcttcacagagttgaactgctgtagaagcaggttttgttgttttacttacttttctaaattattattccttgcctgtctggaaaggttcaaggaagaaataggtggtccaaactgaaatgactgaggagtgtttcgtgagggaagtatttacaaagatgtgcaaggttaagggaaagagacaatgcatgggtcagcaccctaagcaacaatacataggggaggactaagtcctcccctaggctgaaagggagaaggaaggagcagttaccattgtcgccatagccatagctgtagccataggggtggtagagctccagcaggcaggtggagaagccttgcacggccaacacacagccacacaggctgatatgctttggatctgtgtccccaaccaaatctcaggttgattgtaattcccagtgttggagggagggcctggtgggaggtgattaaatagtggggatggtttctcataaatggcttaacactatcccccttcggtattgccttagtgatagtgagttctcatgcaatctagttgtttaaaagtgtgtagcacctcttccctgtctctcttgctcctgctctcaccatgtgagatgacttgctccccctttgcctttcaccatgattggaagcttcctgaggccttcttagaagcagaagctgctatgcttcttgcatagcccgcagagccataagccaattaaacctgttttcttcataaatttcccagtctcaggtatttctttgtagcaattcaagaatgaactaatacacaggcagagagccaggaggtggaaatcccaagtggctctcctgctgtcttccagtctcatccaggtgtctcccagtgtctcaattccaccagaaactggaattaaaaagaatcccactgatgtggtgcacagaagccactctcttggggtgtcaaacaggatagagaagaatggaaagcaaatcatcatagcaaatgagactatccctctctccttcttatatcctcctaattcctgggacagtctctgtctacaggtgattgattcctgtctcatttcagctctttcagactactttaatgttcggcatgtctttctctactgtcacttctatgcagaaatgtttgcattcatccaaaatgcatagaaaataaaatgtaattttaaaaagagaacatatttcttttgtttagaatacaagtttgacccctctcataaagacacaaagtagaaatatcttaaataagaaagtacagtggtgcctctgggtcactaggttctgaatctgcagattcaacaacccacaggtggaaactgttccaaaaataagggtatggcggaggtgtgcatgtactgaacaggtacaaacttgtttttccttgtcattacttctgaaataacacagtaaaacaagaacttacatggcatttgcattttgtcagttattctaagtaacttagaagtgatttaatgtatctgggagaaagtgcataggttttgtacaactatcacatcattttatataaggaaattgagcatctgcagattttggtgtgtgctggggtagcagcacacacatctgccatatgcgaaagcccctgtgaatatccagaaatgacactctttgagatcagtgcgggaagctccaaggcatcgtacatcagaattccaaaaactgctactctcgagtccctagagagttgccctcatacttgtgatcctatatggttcccagccacaccagcatttcagcatgatggaaaaaaaataaggaaaggagatgcgttgctcctgctattggtcctgtgagccaggacttgcttacatcacttttgtgcatctttcactgaacagcacctggtcataaaatggcacccagcatcaaggaaaactggaatgtaggtccttgtgccgcttttaaactctcagaatttttatgtgaccaaacaggaaaatgaacactggggcaacctagcagtctcttctgcctctgtctctgattctgtactcacatcaagatttttcaggaactcctctgaaataatgaatcatgcggcagagaaccatacagaagtctcatgcagggctccagggaccaggggctggcattgggcctgctcttcgtgttgtgaactcatgaaaacactttaattctctaggcctcggcttcatcttatgttatattaagataataccatagatgatctttaaagaacacatgctaaatgttggtgataccacagtggaaaagacaggcatgactagccgttatgaagcttcaggtttcatgaggaagacaaacacaccattaccctaaatatagagggacaatgtgtttagtgccctgcctgtggataacagaggttctccttttcctcccatttcctttttgggccaagcaaggctgtggcagcttgtctctctaagagagctcatgatggatgcactcactcctgatgctcctctgtaatcccagaggagggtgagtcttctttccacctggaggcctcctgtccctgtgcattctcgggattccagagcaaaggtggcctctgataggcaaaaaggaactcctgaatttgttactaaatggctttcactcttctctattttgttccctatttgacctgcttctctttctctatctgaagttggtttaggttagtttttttttttttcaacccacaattttgccgccaacttggatttaatcttgagaatccctcctctcctttacccgctctaacatgtataatcgacacagagtcgtgctgggtgtaaagggctgctcaaagactggatcatgagtcagccctgctgggctcaaattcatactatataagtcccagaatgaataattcactctttttgtgttccaatgcattatctgacatatgggaataatactcattcttaactcctaggctcttcagataattaaaacagacaatacctaataaactctccatcagctgctcttattctcccagattagacccagtcctcattctccagttgaaatctacatgaatatctctctttatactccaagccctacatatctcctatttcgcctcatggactcctcacatacaaatgtttgcatcaacaaagaaacgaaccaaagatctcctgaaagaaagaatgaaataggtttatattgtgtatactcagcagaatactcagtagtgccccacagatattcccacacttcaattacctgctgcagtggcactcaggctcaccctcacttactctttcctctgttctattgctgagcaattcagctcagacccacaccctacccaaaacactgtgtacaaaatgcttctaggggttcggcaaagccacactgagtccttattttaaaggcacatcagtggtcaatttcaggttttgggcactcatcaatcattcttctcaacacagatagagctgtccacaaatagaattctgatgaatgaaattttctgtacctaattaaacatgggtgttctaataacttacattgtgctttcatttttgttttccatttcacccaaatctaccattaccattaggcttctcatgcatgcattcattcattgaatgaatgtatatgaaaagcacagtgtgctgcttatggaataggcactaggagtataaaatgtaaaatgtggtcctgtctgcaatgactgacatgctgagttatttctcacccaccaggcccagccattttcacacttatcctagcgaaggtcacattttcctctggttcataatgcatggtctcctttcctgtccatggatgatcagtcctggtcatgagggtgtcacaaccacctctttgcatacctgaattcctccccctgagagaaaatttcaggcccaggatagagtaatcatcgggtccacagccctggctagatgagtgggggtgttttgatcctaatgttattcccatgttagcacagaacttgtgtggcagtagagagaggtcaggcttcagagtcagcaagaactggatttcaaactggatttgaggacccccaccttttgataggtgacttattctctgtgagtctctgatctgccctctttaaatgaggaagtaaatcccacatggcagggtggtggggagaatcagagatcatacagctggtgatcacaactggtttctgtttccagggtcaccagactagggtttctgagcatggatccaaccatctcaaccttggacacagaactgacaccaatcaacggaactgaggagactctttgctacaagcagaccttgagcctcacggtgctgacgtgcatcgtttcccttgtcgggctgacaggaaacgcagttgtgctctggctcctgggctgccgcatgcgcaggaacgccttctccatctacatcctcaacttggccgcagcagacttcctcttcctcagcggccgccttatatattccctgttaagcttcatcagtatcccccataccatctctaaaatcctctatcctgtgatgatgttttcctactttgcaggcctgagctttctgagtgccgtgagcaccgagcgctgcctgtccgtcctgtggcccatctggtaccgctgccaccgccccacacacctgtcagcggtggtgtgtgtcctgctctgggccctgtccctgctgcggagcatcctggagtggatgttatgtggcttcctgttcagtggtgctgattctgcttggtgtcaaacatcagatttcatcacagtcgcgtggctgatttttttatgtgtggttctctgtgggtccagcctggtcctgctgatcaggattctctgtggatcccggaagataccgctgaccaggctgtacgtgaccatcctgctcacagtactggtcttcctcctctgtggcctgccctttggcattcagtttttcctatttttatggatccacgtggacagggaagtcttattttgtcatgttcatctagtttctattttcctgtccgctcttaacagcagtgccaaccccatcatttacttcttcgtgggctcctttaggcagcgtcaaaataggcagaacctgaagctggttctccagagggctctgcaggacgcgtctgaggtggatgaaggtggagggcagcttcctgaggaaatcctggagctgtcgggaagcagattggagcagtgaggaagagcctctgccctgtcagacaggactttgagagcaacactgccctgccacccttgacaattatatgcgtttttcttagccttctgcctcagaaatgtctcagtggttcctcaaggtcttcaaatagatgtttatctaacctgacagttgcggttttcacccatggaaagcattagtctgacagtacaatgtttagattctccttgatattaccaacacattttccctgttatctcacactgaatctttcctacagaacactttttctgcaattttctttgtaataaaaggagttcctgtacaaaaccctaaaacactctttatacttctttcctacctgatagcatcaaaaaggaagattccttattaatctctcagactatgttcccctgaaaatcatgttcccttctatgactggaggcattactgcagttagaagctcgattcttaataagtgagttctgctatctctacattccattgaattctcagatacagagcaaaataatgtccttagagacagactctctcttcataaaaacactctcaccaattggttttataaaaagtcttcccctgtcatttgttcacagcatggtgatatgttggccttggtttctagtaaagacaactgtggccccttccccttgagaacttttaagtgcttatttagctcttcctggactaatggaccagtgaggagcccataaatgtgccccagttctattttggccattggaaacctcaatattggtttcaaagtggaaattatcttgaaaaccatttattatttgcttacagactctttcagttgtagaagaattcttcatacttccaggttttgtacaaattgttctggctgtaactttcagttagttaaatggccattaacatgagaggcaagactgataacatctgacttttccatgctaatgtcaattatggtatcttgataataacttacagttggtatagaattctgatacatgcttgacatagatgaacctggaaacattctgctaaggaaaataagccagataccaaagaacagtaagttcaaattctaccaggtatccaaactaggaaattcgtgaacacagaaattaaattaggaggatcctggtgctagatgatggggagaatatgtagccattattaaatgagcacagaatttctgtgtggaataatgaaaaattcttaaaagggacagtagtaacagttacaacttattgtgaatgtacttactgacactgattgtacacttaaaatggttaaagttgtaaaatgtatgttatgtaaattttaccacaattaaaaacagttaattatagaaatgggatcagtacaaaattcaggactattccccaccagtggttataatttccacagataactcaagcaggcagaagagattatcaagagaaaatgtgacatcacagcaattaaccctcactgaggggagctgacaactgcaatttgagtatgcaggagactgtacaaagtagctgtgaaaccaataaagaggtatatagttttcaatttgtccaaccaaatttattggtggcacttataacactgttcacaatgttgaactcaggtcccctcagtcctccagatccattgctcttccaggcccagccctctgctgatgctgaatcccatctgtccaccctcaatttccaaatgctgtagtaggacatggctgttggcgagggtttcctacaggtcggaggaagcaggaagccagtgtttgcagccaatgctccaggcaaggagctttgatgtgatgtcttcagttcaggccgagggttattgggagagtccactctgggagtctgtgatatcaattgtacagttttgactaaagatgatgtctatcatgaggaattctgtagaaaattttcacctggcaattgaatcaaataaagtttgtcctcacctgggaaactgcttatcttgatgtcagtgacatttcttttcttttgacggaagaaaacttcaacttcgagaaggcttagattatatcgctgaagcccattctgaactcacctgacctcacacattgctctactacagcacttataacagttcattgaattatttgtcctcacctctttctcttctaccacaccctcagttctttaagagcagagaacatgtctttgaatttctagtgcaacagactaggtgtggaatttagaagaagctcagaactatttttctcaagcagctcacacctgggagtcacagggttgtccagcatcttgcaaaggctagctcagtcaccaagtctcactggaactcctataagcacctcccacttaacagagtgtcctctgcagttggtcattctgagaacagctgttgccttttatcgcaggtctgctcactgcctctgggaagaagaatggaggggatgtgggagtctgctcatgagctgccttctttccaaggtcaatgatatcatttcctctcaggtacatgtcaaggaagagcatgcaggacatccaggagtgttctccagaaagtaagaaatgatatgaaaatctctcacggcaccttttgggagctgccattcatgactattttttaggcatgaattcaacaaacattcaaacctaattcatcaggcactgtgataattctacataaaagcaaacgcctttcaaataagcctctcactaatatattctatgtctataaccaaacctttcaccttcatgaagaaaatatattgattgattccgagcaaatgctgagccttcatggcaattcactgatgctctagtagtacacctgggctcaaggacactgagtcatcagcctcagaagaaccagttggatctgtttctcgtcctgcttttgccaattaggcttgtcaatataatttcctaatttatcaaaatacagcacaagttaatgaaacaagagtatgaaagaagaattgcggtttccataaagctaatgtgaatgcttaaatggaaaataaaagcaggttccaaaattgttagtttagtagctgtgagtcttccaactctacaagattaaacaaaaatgaaaaatattgaacaacatttttagacagaatgctatgcatctgatgctaaattctactcttaaactaatccaaactgcaaatcacagagaatgattgatagctatgctttcagcaagacagagtagaattctatttgctgaaacctacacaaagaaatgttctttagtctatttctattatactgaacaaattacaggtaaaaatgaaatattcatgttacaaatgtatcattttttataaatactgattaacagacatttccaattaacctatccacttccattcctgaatatattatgactgggcttttcatagcaatatctccacttattccactatttattgtttaaatacatactgagcatcttctactctctggcttgcatgccagacacttgggagtcaaagtaaacatacccacattcccagagcacacagcctgtgaaggacactagtgcaggaaagactgcctcccaatgtgacacatgctatcccagcattgtgtttgtggctcaagggtgctcagaagagagggtatctataaatcccaagttatcttgctgccatcctgaagatgaatgtcacacccaagcacccagctgaagcaggacaacacgattttaataaattagagaatattcaccaggtgactgctcatgcaagacaacaatctctgcaacagttttgtaattaatgacatcacaaaacgaataggctgaatcttacaacagccctcggtctataatctaacatcataccaatgtacaattcctgaaaagattttcaagaggccttgcagttgcttaggcaacaggcattgcagaactacctactaccattacctgtgttccagcagaagaagcccttgcctccaggcaaacccaattcagcatctggaaatcccaggatatgtagggaagtaggatgtgcaagtgctagaatgggaagaacactcccctagtttaagggatttgggattctcaagctgactgcatggccaacatggatcacatgctcattccaggcaagccaagcagatagtgaggttatgggattgcccctgtctgaaactgtgccatttgtgcatttgtgctcaggtatctcttttcagaatatgtgggtaaagtgtgactttaccataaccatggactgaagataaatagtattgtgatccagaccacctgagaaatttacgtctctacacagtgactataatcacagtaagcatatgttcttctcacccatgtggaagcgacctagaatccaaagagactgctctgatgcttgttctgtatgacggtgtggtatcagctgggcaccatttttgtcaatgtaccaatgctcactatagatacagatggcatttgtttgctgttatctagcagttacagtagagtataaaaaaagaaatctcaatgctcatgcccatcatattggtccaattgttctgaaaccttgcaggatgcaaacacaaggaaggagggcagagacagagcagacctcattcctgagcgtgtatgtagaagtgagtggatcatggaagacttcgtgtaataggtagaattttaaccgatgactacaattaacccagcattattattgtaattataccctagtaaattttgccagtcacctaaatttttgtattgggcaaggagagataaatagaatctggacagatggaaattggacgagagataatttacagtggcaccgttaataaaagcatagagttttttggggaatggtgaataattcatacatgtgttttattccttgtgtcaccccatgtatttggtcatggtggcaagatccatcttaaatagaatcacaagactggagtactcggaataatgagcattaacttttgtggccttgaagtgataggggttggtgttcgttttgtgatattcacaggggtgagctctatattaatgtaaagtccagagagggccaggcagggcagcccaacaggacaaatcacaaaggcaatgccctgctctccttaccctcctcacggtgatatgtctagccctccagggtcagaaggcatcgattaaaaaaaaacaagaaaaagtctggggtttaagggagaagagaaaagcaatggaatgcagccccttctctggaaatccaacattgtaactgtcacataaaaattcagacccaaactctgcatagctttgatatggatgcccaaaaatttctattaaaattatgtgtcacctagcacctctttgtaacgtaatatctgtagtgacttgacattgagtttaatactcctgttttaacatcctggtacacatgtgagagaataatacatattaaccgcagacattctgaagaaaattgttattcccactccaggtgtgcaggcacacttgccttcttatcaaagacatgtacaattattgctgagagtagagatgcatgattcagacttaagttgtgtctgtaaaagtgtatgtattcattttaagagttattggaaacaaatatgataaaaatttaatatgtgcttaattttgtggaaggtgtctgttagtgcttactatgttatcttctagcctatgtgcctggtttacaaacttccttccagcaaaccccatgtcttcattcttggtgacttcaatatccatggaggtaagtccatagaacgaacaggtctttgttttttaagttttcgttgtaaattaattgtagactatgaagaagttatgaaaacagtacaaagagttcctgtatgcccatcacccaatctacagcaatatttacatgttaaataaatgtattatcaaaaccaggaaattgacattgataccatctaattatctacactacaaaacttatcaaatttcaccaaatatctatggtaccatcttaccaaattttaccactgtttgcatgcactcatttttggagtgagatattcctctatgtttcattccataacattttgtcacaggtgtagattcataaccacaatcgcattacatacagaagtgtttcttcaccacaaagatttcccttgggctcctcctactgtcatacccacagtatgtttcttcccaaattcctctagtgattgatctattcttcatctctataatttcatcatttcaaaagtgttatataaatggaatcatatagtatctaatcttttgactttggcttttttcattcagcataatgtcctcaggatccacccaactttttgcaggtatccatagcttattgctgacttttttttatactactgagtagtgttccattgtatggatgtactatgctttgtttcactattcacaagtggaaagacattgctgttttttctaacgtggcatttataaataaagcagctatacacgtatgtgtacagacttttttattttactttaagttctgggatacatgtgtataatctgcaggtttctaacataggtatacatctgccatggtggtttgctgcaactatcaacccatcatctaggtttttagccccatgtgcattaggtatttgtcataatgctctccctccccttcctgcccacctcctgacaggcccctgtgtgtaatgttcccctccctgtgttcaacggttctcatttttctactcccaattatgattgagaacatatgttgtttggttttctattcttgtgttagtttgctgagaattatggcctccagcttcatccatgtccctgctaaggacacgaactcattcttttttatgactgcatagtattccatagtgtatatgtactacattttcttcatccagtctatcattgatgggcatttgggttggttccaacctaacccactattgtaaatagtgctgcaataaacatacgtatgcaagtgtctttatattagaatgatttataatcctttggatgtatacccagtaatcggattgctgggtcaaatggtatctctggttctacatccttgagaaatctcctcactgtcttccacaatggttgaactaatttacacacctaccaacagtgtgaaagcgttcctatttctccacagcctcagcagtatctcttgtttcctaatttaaattaccattctgactgacacgagatggtgtcccactgtggttttgatttgcatttctctaatgaccagtgatgatgagcttgttttcatacatttgttggctgcataaatgtcttcttttgagaagtgtctgttcatatccttcgcccactttttgatggggttgattgttttcctcttttaagtgcttctaacttccttgtaaattctggatattagacctttgtcaaatgatgagattgcaaaaattttctaccattctttaggttgcctgttcactccgatgatagtttcttttgctgtgcagaagctctttagtttaattagatcccatttgtcaattttggcttttgttgcaattgctcttggcattttcatcatgaagtcattgcccatgcctatgtcctgaatggtattgcctagattttcttctagggtttttatggttttggcctttacatttaagtgtttaatccatcttcagttaatttttgtatatggtgtaaggaaggggtccagtttctgttttctgcatatagctagccagttatcccagcaccacttattaaatagggaatcctttcaccattgcttatttttgtcaggtttgtcgaagatcagatggttgtagatgtgtggtgttatttctgaggtctctgttctgttccactggtctatatatatctgttttggtaacagtaccatcctgttttggttactgtagccttgtgatatagtttgaagtcaggtagcatgatgcctccagctttgttccttttgcttaggattgtcttggctatacgggctcttttttggttttaaaatttaaagtagttttttctaattctgtgtagaaagtcaagggtagcttgatgggaatagcactgaaactataaattactttgggtagtatggccattttcacgatactgattcttcatacccatgagaatggaatttttttccatttgtttgtgtcctctcctacttccttgagcagtggtttgtggttctccttgaagaggtctttcacaacccttgtacattgtattcctaggccttttattctctttgtagcaattgtgagtgggagtttactcatgacttggctctctgcttgtctattattggtgtatagaaatgcttgtgatttttacaaattgattttgtatcctgagactgctgaagttgcttaccagcttaaggagtttggggctgagacgatggggttttctaaatatagaatcatgtcatctgcaaacagagacaatttgacttcctctcttcctatttgaatacccttcatttgtttttcttgcctgatttccctggccagaacttccaatgctatgttgaatatgagcggtgagacagggtatttttgtcttgtttccggtttttaaaggaagtgcttccagtttttgcccattcagtatcatattggctatgtgtttgtcataaatacttcttattaatttgagtatattccatcaatacctagttgattgagagtttttaacatgaagggatgttgaattttatcaaaggccttttctgcatctatcgagataatcacgtggtgtttgttatcggttctgtttatgtgatggagtacacttgttgatttgtgtatgttgaaccagtcttgcatcacagggatgaagccgacttggtcatgatggataagttttttgacgtgctgctggattcggtttgccattactttattgaggatttttgcactgatgttcctcaaggatattggcctgcaattttttttgttgttgttgtgtctctgccaggttttggtatcaggatgaggctggccttataaaatgaattagggaggagtccctcattttctattgtttggaatagtttcagaaggaagagtaccagctccttttgtacctctggtagaatttgtctgtcaatctatcgggtcttgggcttttgttcattggtatgctattaattactgcctcaatttccaaacttgttattggtctattcaggcattcaacttcttcctggtttagtcttgggagggtgtatgtgtccaagaatttttccatttcttctagattttctagtttatttgctttgaggtgtttatagtattctgtgatggtagtttgtatttctgtgggatcagtggtgatatcccctctatcattttattgtgtctatttgattcttctctctttttttctttactagtctagctagtggtctatctatcttgttaatgttttcaaaaaaacagtatggctatggctagctcctagattcactgattttttggaagggtttttggtgtctctatctccttcagttctgctctgatcttagttatttcttgtcttccattagcttttgaatttgcttgcttttgcttctgtagtttttttaattgtgatgttagggtgttgatttcaagccttttcagcgttctgatgtggacatttggtgctattaatttccctcttaacagtgctttagctgtgtcccagagattctggtacattgtctctttgttcttatcagtttcaaagaacttctttattagctgtgtcccagatactggtatgttgtctctttgttctcattagtttcaaagaacttctttatttgtgccttcatttttttatttacccagtagtcattcaggagtagcttgttcaacttccatgtagttgtgtggttttgagtgagtttcttaatcctgagttctcatttgaatgcactgtggtcagagagattgtttcttataatttccaatattttgcatttgctgagaagtgttttacttccaattatgtggtcaattttagaagaagtgctacatggcactgagaagaatgtgtattctgtaatttggagtggagagttcttttgatgtctattaggttcacttggtccagagctcagttcaagtcctgaatatccttgttaattttctgtcttgttgatctatctgacagtggggtgcaaaagtctcctgctattattatgctggagtctaagtctatttgtaggtctgtaacaacttgttttatgaatatgtgtgctcctgtattgggtgcaaatatatttaggatagttagctcttcttgttgcattgatccctttaccactatgtaatgccctcctttgcttttttttctgtgttggtttatagcctgttttattagagagtaggattgcaaccactggttttttttttgttttgtttttgttttgttttttctttgctttccatttgcttggtaaatattgctccatccctttattttgagcccaagtgcctttgcacgtgaggtgggtctcctgaatacagcacacctacgggtctggaccctttacctaatttgcccatccttgtcttttaattgggggcatttagcccatttacatttaaggttaatattgttatgtgtgaatttgatcctgtccttatgatgctagctggttattttgcacattagttgactcagtttcttcatagtgtcattggtctttatattttggtgtgtttttgtagaggctggtactggttttttgtttccatatttagtgcttcctttaggagctcttgtaaggcaggcctgggggtgacaaaatccctcagcatttgcctgtcaggaaaggattttatttctcctttgtttgttgagcttagtttggctggatatgaaactctgggttgaaaatacttttttttttttgactgttgaatattggcccccattctcttctgacttgtagggtttctatagagagatctactgttattctgatgagcttctctttttagatagcctaacgtttctctctggctgctcttaatattttttacttcaacttaactttgaagaatctgacaattctgtgtcttagggttgctcttcttgaggggtatcttagtggtgttctctctatttcctaaatttgaatgttggcctgtcctgctaggatggtgaagttctcctggataatatcctgaagtgtattttcgaacttggttccattctccccatcactttcagttgcaccaatcaattgtaggtttggtcttttcacatagtcccatatttcttggaagttttgttcattccttttcattcttttttctctaatctagtcttcatgccttatttcagtaagttgatctccaacctctgatattctttcttctgcttgattgattcagctattgatacttgtgtatacttcacaaagtccttgtgctgtgtttttcagctccatcaggtcacttatgttcctctctgtactggttattctagttagcagttcctgtaaccttttatcaaggttcttagctttcttgcattgggttagaatatgctcctttagctcagaggagtttgttattacccatcttttgaagcctacttctgtcaattcatcagtctcattctccatgcagttttgtgtctttgctggagaggagcttctaacatttggaggagaaaaggcattctggtttttggaattttcaatatttttgcactgcttattcttcatatttctggatttatctacatttgatcttttaggccgataacctttgggtggggtttttgtgtgggggtctttttagttgatgttgatgttattgctttctgtttgctagtttgtcttctaacagtcaggcctctcttctgcaggtcggctgcagtttgctggaggtccaatccagaccctgttcacctgggtatcaccagtggaggctgcagaacagcaaaagatggctgcctgatcctttctctggaagcttcattccagaggggcactggcctgatgccaactagagctctcctgtatgaggtgtctgtccacccctgttaggaggtctctcccagttgggaggcacgggggtcagggacccacttgaggaggcaatctgtcccttagcagagctggtgcactgtgctgggagaaccccccttgtcaggatcagctgctatcttcagaggcagcaggcaggaaagattaaatctgctgcggttgcgcccacagcctccccttcccccacgtgctccatcccagggagataggaattttatctgtaaacccctgactgcgcctgctgtctgtccttcagagatgtcctgcccagtgaggaggaatctagagaagtagtctggccatagctgcttagccgcgctgtggtgaattccgcccagtccaaacctcccagccttcttagcactgtcaggggaaaaccgcctactaaagcctcaggaatggcggatacccctctctccacaaagctcaatcgccccaggtcgacttcagactgctgcgccggcagtgagaatttcaagccagtggttctttgcttgctgggctctgtgggagtgggacccattgaggcaggggaccacttgtctccctggcttcagccccctttccaggggagtgaacggatctgtctcactggagttccaggcaccactggggtatgaaaaaaactcctgcatctaggtcggtctctgcccaaacagctgcccaatattgtgcttgaaacccagagccctggtggtgtaggcacacgagggaattcctgatctgcggatcgcaaaaaccatttcaaaagcgtagtactgggctggtagcagggttcctcacagcttcccttgattgggggacaggtgtcccctggctccttgtacttcgcagatgaagcgatgccccaccctgcttctccttgctctccgtgggttgtacacactgcctaaccagtctcaatgagatgaactgggtacctgagttggaaatgcagaaatcaccagtcttctgcgttggtcccgctgggagctgcagaccagaactgtttttatttggccatcttggcccccctcctgtacagatttttaagtgaacacagtttcccagtttctaggatacattttccaggttctaggatacgctggattgctggattatatgaaaatgcaagaagatttcccagagtagctctactattttactttctcattggcagtgtatgagacctccaattccttcaaatctcagccaatatttgaaactatcagtattttatattttagccatattgagagggtagagtggtatctcgtgacttttatttgttgtcctaaacattagtgatgttgagcatctttttacgtgtttatttgtcatgcatatatgtgtttgctgaagcatctgttcgtcttttaccctgattgaatccagctctccactaactccatgcctgttcccatagaactgagggtggctgcagcacaacacacaaccatgcccagcggtttcactgttcatttatgaccttgaacctgaaatgttcacttatatctcctgaacagtcatgtgacatttccataattgcctctcatctccaaaggaaaaccttcagccatcgtctgtctcctgaaaccacctactctttatttatttttttaatcactgtcaggtgatgctcttctgagaattactcaatctccccagagcgaacctacctccccatgtgcctctgagcacacctctctgcattttctctcatgccaggaaatgggctctgcaaattcctgtttgaaaccaccctttccatttgtgcagtttccccttttgcctccccagaaacattttatagcattattgcctctcccttctacatcttcaatgtttccttctctaatggatccttccattgcaactgaaacaccccatcctatttgtggcataaaacaccatctaagcaaccattcgtctctatccacagcctgatttatcttctttattttagaaaaaaatatcttccaaagagatttctgtactcattatcttcatttcctcacccttcctcatatcttctcatatctctaactccctctcttagctagatcattaaatttatgttttttgtttgaaaatttatttgtgacatggtaataaagtcaaagctttcaaaaataatctttaaatacactcactgaaaactgtcattcccattttaggtcctcaggcatccttgccttgttaacaaagacatatcctattatacttactaataagtgtatattaattcacaaatatttaataataaaacaatatatatatttttcatacaatatatacattggtctgcattctttttaaaaaatctaacaaattctgcagggccttttatatcaggtttgttgctctttctgggtagctacagagtattctattgcatagatagacagtaatttatacagtattgatggccattttggctgttaccagtttttgactgtaaataacactgcatttattaactcagaacatagatcttttgaacatgcacaaatatatctctaagataaattcttagatgaggaattacagagagaaaaggatggtgctttatacatgcttccatatgttgaaaacagccttcactggaagttgtatccatctgcatccccagcagaaatgagtgagggtacctgatcccactccatccccacactgtatgctataaaacttaatggttttttagattttggtaaataaaatataactctgtaatttcaattggcatgtctttcattatgagttgaatttctcctctttccatatgtttaggagccatttttattttttagaaattgtgaatcatgacttaaagttattttcttattacctttttcaattttgaattattaacatcatttagaaaaatttgtatcaatagagaaaatttatactttggctataacatacattaccaaacatctcccagtttatttatttaattttattaatttactaatttatttcttgagatggagtctcgttctgtcacccaagctggagtgcagaggcacagtcttggctcactgcaaatttcgtctactaggttcaatccattctcttgctcagcctctcgagcagctgggattacaagcgtgtcccaccacaacgaattaatttttgtatttttagtagagaccaggtttcaccatggtggccaggctggtctcatactcctgacctcaggtgatctgcctgccttggcctcccaaagtgctgggattacaggggtgaaccaccatgcctggccacagtttatttatatcttgattatgatggttaatgttatgctaaaaaaaataacttttttttttttttgagacaaagtctggctctatcagccaggggagtgcaatggtgtgctgtcagctcactgtaacctccacggcctgggctcaagccatcctgccaccacaacgtcccaggtagctgggactacagacatgcaccaccacaccaggctagtttttgtattttttgtagaaacgggttttcactatgttgcccagaatggtctcaaacttgtaagctcaagcaatccacccacgcagcctcccaaagtgctgggattacaggaatgggccatcacagctagcctttttgtctttataaatattttctttaatatcttctgaattgtatcctataattgaaagtctttttccactttgatttaaaaactatttggctatggcttctccaggtaattgtattttcattataaaattttaagtagtgtatttgcatgtatcctcaaatcatatgtaaagtatgtttccacctttacttatttcacacagaaactcagttgtcccaatcccattcattcaattgtgcctgttttacacactactttgatatacaacctttatcataataggcatacattgaagatattagaagtccacttccactactgcaataaagcaaatattacaataaagtgaatcacatgaatttttggtgtcccggtacatgtaaaatttatgcttacactatactgtactctattgagtctcaatggcattatgtctaaagcaatgtgcatgcattacttaaaaaaatactttttcactaagaaatggtaaccatcatcagaaacttcatcaagccaaacgttttgctgctggagggtcttgcttgatattgatggctgctgaagtggctgctgaaggtaagacaggctgtgccaatatcttaaaacaagacaacagtgaagtctgccacatcaactgactcatccttttatgaaagattttaatgtagcatgcaatgctatttgcatagcattttatacacaatagaacttcttttaaaatgggagtccattctctcaaactgcgccactgtttttatcaaggaagttgaacaagatggaatgtgatgggagaggcttatctctattggatatgggacagaggccaagaatcatctcaggtagggtttgtgtctccaatacctctggccactgatttgtccatagtcctcatacaggaaataacaagtctgtccagcatcttcataagcctggattgctcaccagctttgactccagctcctgtatgcatctcctgaattaagcaacacagaagggttctctgaagtcactgaatcccagaaaggccctccacctttagcacaagggacgtcttcaccactggacaaaggagaaaaagataagggtaagtaccaagatttgtcttcttccatagtcagtcatggtttttgctataagatcgtttctgtttccacctaggtgctacaggcaggggatcatgagcttgtttcaggaaaagacaggggacatgaagtttccttctggaaactgagtgctgccaacccagactgtgtgagtttcaactggagtccccccatttgatttatctgtccatatcacctcccttattccaatcactgaacctgtcctcttagagaaaatgctgcctctcacattcatttaaggagctagaggacatgcaagcattgcttcacagagttgaactgctgtagaagcaggttttgttgttttacttacttttctaaattattattccttgcctgtctggaaaggttcaaggaagaaataggtggtccaaactgaaatgactgaggagtgtttcgtgagggaagtatttacaaagatgtgcaaggttaagggaaagagacaatgcatgggtcagcaccctaagcaacaatacataggggaggactaagtcctcccctaggctgaaagggagaaggaaggagcagttaccattgtcgccatagccatagctgtagccataggggtggtagagctccagcaggcaggtggagaagccttgcacggccaacacacagccacacaggctgatatgctttggatctgtgtccccaaccaaatctcaggttgattgtaattcccagtgttggagggagggcctggtgggaggtgattaaatagtggggatggtttctcataaatggcttaacactatcccccttcggtattgccttagtgatagtgagttctcatgcaatctagttgtttaaaagtgtgtagcacctcttccctgtctctcttgctcctgctctcaccatgtgagatgacttgctccccctttgcctttcaccatgattggaagcttcctgaggccttcttagaagcagaagctgctatgcttcttgcatagcccgcagagccataagccaattaaacctgttttcttcataaatttcccagtctcaggtatttctttgtagcaattcaagaatgaactaatacacaggcagagagccaggaggtggaaatcccaagtggctctcctgctgtcttccagtctcatccaggtgtctcccagtgtctcaattccaccagaaactggaattaaaaagaatcccactgatgtggtgcacagaagccactctcttggggtgtcaaacaggatagagaagaatggaaagcaaatcatcatagcaaatgagactatccctctctccttcttatatcctcctaattcctgggacagtctctgtctacaggtgattgattcctgtctcatttcagctctttcagactactttaatgttcggcatgtctttctctactgtcacttctatgcagaaatgtttgcattcatccaaaatgcatagaaaataaaatgtaattttaaaaagagaacatatttcttttgtttagaatacaagtttgacccctctcataaagacacaaagtagaaatatcttaaataagaaagtacagtggtgcctctgggtcactaggttctgaatctgcagattcaacaacccacaggtggaaactgttccaaaaataagggtatggcggaggtgtgcatgtactgaacaggtacaaacttgtttttccttgtcattacttctgaaataacacagtaaaacaagaacttacatggcatttgcattttgtcagttattctaagtaacttagaagtgatttaatgtatctgggagaaagtgcataggttttgtacaactatcacatcattttatataaggaaattgagcatctgcagattttggtgtgtgctggggtagcagcacacacatctgccatatgcgaaagcccctgtgaatatccagaaatgacactctttgagatcagtgcgggaagctccaaggcatcgtacatcagaattccaaaaactgctactctcgagtccctagagagttgccctcatacttgtgatcctatatggttcccagccacaccagcatttcagcatgatggaaaaaaaataaggaaaggagatgcgttgctcctgctattggtcctgtgagccaggacttgcttacatcacttttgtgcatctttcactgaacagcacctggtcataaaatggcacccagcatcaaggaaaactggaatgtaggtccttgtgccgcttttaaactctcagaatttttatgtgaccaaacaggaaaatgaacactggggcaacctagcagtctcttctgcctctgtctctgattctgtactcacatcaagatttttcaggaactcctctgaaataatgaatcatgcggcagagaaccatacagaagtctcatgcagggctccagggaccaggggctggcattgggcctgctcttcgtgttgtgaactcatgaaaacactttaattctctaggcctcggcttcatcttatgttatattaagataataccatagatgatctttaaagaacacatgctaaatgttggtgataccacagtggaaaagacaggcatgactagccgttatgaagcttcaggtttcatgaggaagacaaacacaccattaccctaaatatagagggacaatgtgtttagtgccctgcctgtggataacagaggttctccttttcctcccatttcctttttgggccaagcaaggctgtggcagcttgtctctctaagagagctcatgatggatgcactcactcctgatgctcctctgtaatcccagaggagggtgagtcttctttccacctggaggcctcctgtccctgtgcattctcgggattccagagcaaaggtggcctctgataggcaaaaaggaactcctgaatttgttactaaatggctttcactcttctctattttgttccctatttgacctgcttctctttctctatctgaagttggtttaggttagtttttttttttttcaacccacaattttgccgccaacttggatttaatcttgagaatccctcctctcctttacccgctctaacatgtataatcgacacagagtcgtgctgggtgtaaagggctgctcaaagactggatcatgagtcagccctgctgggctcaaattcatactatataagtcccagaatgaataattcactctttttgtgttccaatgcattatctgacatatgggaataatactcattcttaactcctaggctcttcagataattaaaacagacaatacctaataaactctccatcagctgctcttattctcccagattagacccagtcctcattctccagttgaaatctacatgaatatctctctttatactccaagccctacatatctcctatttcgcctcatggactcctcacatacaaatgtttgcatcaacaaagaaacgaaccaaagatctcctgaaagaaagaatgaaataggtttatattgtgtatactcagcagaatactcagtagtgccccacagatattcccacacttcaattacctgctgcagtggcactcaggctcaccctcacttactctttcctctgttctattgctgagcaattcagctcagacccacaccctacccaaaacactgtgtacaaaatgcttctaggggttcggcaaagccacactgagtccttattttaaaggcacatcagtggtcaatttcaggttttgggcactcatcaatcattcttctcaacacagatagagctgtccacaaatagaattctgatgaatgaaattttctgtacctaattaaacatgggtgttctaataacttacattgtgctttcatttttgttttccatttcacccaaatctaccattaccattaggcttctcatgcatgcattcattcattgaatgaatgtatatgaaaagcacagtgtgctgcttatggaataggcactaggagtataaaatgtaaaatgtggtcctgtctgcaatgactgacatgctgagttatttctcacccaccaggcccagccattttcacacttatcctagcgaaggtcacattttcctctggttcataatgcatggtctcctttcctgtccatggatgatcagtcctggtcatgagggtgtcacaaccacctctttgcatacctgaattcctccccctgagagaaaatttcaggcccaggatagagtaatcatcgggtccacagccctggctagatgagtgggggtgttttgatcctaatgttattcccatgttagcacagaacttgtgtggcagtagagagaggtcaggcttcagagtcagcaagaactggatttcaaactggatttgaggacccccaccttttgataggtgacttattctctgtgagtctctgatctgccctctttaaatgaggaagtaaatcccacatggcagggtggtggggagaatcagagatcatacagctggtgatcacaactggtttctgtttccagggtcaccagactagggtttctgagcatggatccaaccatctcaaccttggacacagaactgacaccaatcaacggaactgaggagactctttgctacaagcagaccttgagcctcacggtgctgacgtgcatcgtttcccttgtcgggctgacaggaaacacagttgtgctctggctcctgggctgccgcatgcgcaggaacgccttctccatctacatcctcaacttggccgcagcagacttcctcttcctcagcggccgccttatatattccctgttaagcttcatcagtatcccccataccatctctaaaatcctctatcctgtgatgatgttttcctactttgcaggcctgagctttctgagtgccgtgagcaccgagcgctgcctgtccgtcctgtggcccatctggtaccgctgccaccgccccacacacctgtcagcggtggtgtgtgtcctgctctgggccctgtccctgctgcggagcatcctggagtggatgttatgtggcttcctgttcagtggtgctgattctgcttggtgtcaaacatcagatttcatcacagtcgcgtggctgatttttttatgtgtggttctctgtgggtccagcctagtcctgctgatcaggattctctgtggatcccggaagataccgctgaccaggctgtacgtgaccatcctgctcacagtactggtcttcctcctctgtggcctgccctttggcattcagtttttcctatttttatggatccacgtggacagggaagtcttattttgtcatgttcatctagtttctattttcctgtccgctcttaacagcagtgccaaccccatcatttacttcttcgtgggctcctttaggcagcgtcaaaataggcagaacctgaagctggttctccagagggctctgcaggacgcgtctgaggtggatgaaggtggagggcagcttcctgaggaaatcctggagctgtcgggaagcagattggagcagtgaggaagagcctctgccctgtcagacaggactttgagagcaacactgccctgccacccttgacaattatatgcgtttttcttagccttctgcctcagaaatgtctcagtggttcctcaaggtcttcaaatagatgtttatctaacctgacagttgcggttttcacccatggaaagcattagtctgacagtacaatgtttagattctccttgatattaccaacacattttccctgttatctcacactgaatctttcctacagaacactttttctgcaattttctttgtaataaaaggagttcctgtacaaaaccctaaaacactctttatacttctttcctacctgatagcatcaaaaaggaagattccttattaatctctcagactatgttcccctgaaaatcatgttcccttctatgactggaggcattactgcagttagaagctcgattcttaataagtgagttctgctatctctacattccattgaattctcagatacagagcaaaataatgtccttagagacagactctctcttcataaaaacactctcaccaattggttttataaaaagtcttcccctgtcatttgttcacagcatggtgatatgttggccttggtttctagtaaagacaactgtggccccttccccttgagaacttttaagtgcttatttagctcttcctggactaatggaccagtgaggagcccataaatgtgccccagttctattttggccattggaaacctcaatattggtttcaaagtggaaattatcttgaaaaccatttattatttgcttacagactctttcagttgtagaagaattcttcatacttccaggttttgtacaaattgttctggctgtaactttcagttagttaaatggccattaacatgagaggcaagactgataacatctgacttttccatgctaatgtcaattatggtatcttgataataacttacagttggtatagaattctgatacatgcttgacatagatgaacctggaaacattctgctaaggaaaataagccagataccaaagaacagtaagttcaaattctaccaggtatccaaactaggaaattcgtgaacacagaaattaaattaggaggatcctggtgctagatgatggggagaatatgtagccattattaaatgagcacagaatttctgtgtggaataatgaaaaattcttaaaagggacagtagtaacagttacaacttattgtgaatgtacttactgacactgattgtacacttaaaatggttaaagttgtaaaatgtatgttatgtaaattttaccacaattaaaaacagttaattatagaaatgggatcagtacaaaattcaggactattccccaccagtggttataatttccacagataactcaagcaggcagaagagattatcaagagaaaatgtgacatcacagcaattaaccctcactgaggggagctgacaactgcaatttgagtacgcaggagactgtacaaagtagctgtgaaaccaataaagaggtatatagttttcaatttgtccaaccaaatttattggtggcacttataacactgttcacaatgttgaactcaggtcccctcagtcctccagatccattgctcttccaggcccagccctctgctgatgctgaatcccatctgtccaccctcaatttccaaatgctgtagtaggacatggctgttggcgagggtttcct

SEQ ID NO: 5 - DNA, 7089 bp, synthetic construct
  source 1..7089: mol_type = other DNA
cctgcaggcagctgcgcgctcgctcgctcactgaggccgcccgggcgtcgggcgacctttggtcgcccggcctcagtgagcgagcgagcgcgcagagagggagtggccaactccatcactaggggttcctgcggcctctagactcgaggcgttgacattgattattgactagttattaatagtaatcaattacggggtcattagttcatagcccatatatggagttccgcgttacataacttacggtaaatggcccgcctggctgaccgcccaacgacccccgcccattgacgtcaataatgacgtatgttcccatagtaacgccaatagggactttccattgacgtcaatgggtggagtatttacggtaaactgcccacttggcagtacatcaagtgtatcatatgccaagtacgccccctattgacgtcaatgacggtaaatggcccgcctggcattatgcccagtacatgaccttatgggactttcctacttggcagtacatctacgtattagtcatcgctattaccatggtgatgcggttttggcagtacatcaatgggcgtggatagcggtttgactcacggggatttccaagtctccaccccattgacgtcaatgggagtttgttttggcaccaaaatcaacgggactttccaaaatgtcgtaacaactccgccccattgacgcaaatgggcggtaggcgtgtacggtgggaggtctatataagcagagctctctggctaactaccggtgccaccatggccccaaagaagaagcggaaggtcggtatccacggagtcccagcagccaagcggaactacatcctgggcctggacatcggcatcaccagcgtgggctacggcatcatcgactacgagacacgggacgtgatcgatgccggcgtgcggctgttcaaagaggccaacgtggaaaacaacgagggcaggcggagcaagagaggcgccagaaggctgaagcggcggaggcggcatagaatccagagagtgaagaagctgctgttcgactacaacctgctgaccgaccacagcgagctgagcggcatcaacccctacgaggccagagtgaagggcctgagccagaagctgagcgaggaagagttctctgccgccctgctgcacctggccaagagaagaggcgtgcacaacgtgaacgaggtggaagaggacaccggcaacgagctgtccaccaaagagcagatcagccggaacagcaaggccctggaagagaaatacgtggccgaactgcagctggaacggctgaagaaagacggcgaagtgcggggcagcatcaacagattcaagaccagcgactacgtgaaagaagccaaacagctgctgaaggtgcagaaggcctaccaccagctggaccagagcttcatcgacacctacatcgacctgctggaaacccggcggacctactatgagggacctggcgagggcagccccttcggctggaaggacatcaaagaatggtacgagatgctgatgggccactgcacctacttccccgaggaactgcggagcgtgaagtacgcctacaacgccgacctgtacaacgccctgaacgacctgaacaatctcgtgatcaccagggacgagaacgagaagctggaatattacgagaagttccagatcatcgagaacgtgttcaagcagaagaagaagcccaccctgaagcagatcgccaaagaaatcctcgtgaacgaagaggatattaagggctacagagtgaccagcaccggcaagcccgagttcaccaacctgaaggtgtaccacgacatcaaggacattaccgcccggaaagagattattgagaacgccgagctgctggatcagattgccaagatcctgaccatctaccagagcagcgaggacatccaggaagaactgaccaatctgaactccgagctgacccaggaagagatcgagcagatctctaatctgaagggctataccggcacccacaacctgagcctgaaggccatcaacctgatcctggacgagctgtggcacaccaacgacaaccagatcgctatcttcaaccggctgaagctggtgcccaagaaggtggacctgtcccagcagaaagagatccccaccaccctggtggacgacttcatcctgagccccgtcgtgaagagaagcttcatccagagcatcaaagtgatcaacgccatcatcaagaagtacggcctgcccaacgacatcattatcgagctggcccgcgagaagaactccaaggacgcccagaaaatgatcaacgagatgcagaagcggaaccggcagaccaacgagcggatcgaggaaatcatccggaccaccggcaaagagaacgccaagtacctgatcgagaagatcaagctgcacgacatgcaggaaggcaagtgcctgtacagcctggaagccatccctctggaagatctgctgaacaaccccttcaactatgaggtggaccacatcatccccagaagcgtgtccttcgacaacagcttcaacaacaaggtgctcgtgaagcaggaagaaaacagcaagaagggcaaccggaccccattccagtacctgagcagcagcgacagcaagatcagctacgaaaccttcaagaagcacatcctgaatctggccaagggcaagggcagaatcagcaagaccaagaaagagtatctgctggaagaacgggacatcaacaggttctccgtgcagaaagacttcatcaaccggaacctggtggataccagatacgccaccagaggcctgatgaacctgctgcggagctacttcagagtgaacaacctggacgtgaaagtgaagtccatcaatggcggcttcaccagctttctgcggcggaagtggaagtttaagaaagagcggaacaaggggtacaagcaccacgccgaggacgccctgatcattgccaacgccgatttcatcttcaaagagtggaagaaactggacaaggccaaaaaagtgatggaaaaccagatgttcgaggaaaagcaggccgagagcatgcccgagatcgaaaccgagcaggagtacaaagagatcttcatcaccccccaccagatcaagcacattaaggacttcaaggactacaagtacagccaccgggtggacaagaagcctaatagagagctgattaacgacaccctgtactccacccggaaggacgacaagggcaacaccctgatcgtgaacaatctgaacggcctgtacgacaaggacaatgacaagctgaaaaagctgatcaacaagagccccgaaaagctgctgatgtaccaccacgacccccagacctaccagaaactgaagctgattatggaacagtacggcgacgagaagaatcccctgtacaagtactacgaggaaaccgggaactacctgaccaagtactccaaaaaggacaacggccccgtgatcaagaagattaagtattacggcaacaaactgaacgcccatctggacatcaccgacgactaccccaacagcagaaacaaggtcgtgaagctgtccctgaagccctacagattcgacgtgtacctggacaatggcgtgtacaagttcgtgaccgtgaagaatctggatgtgatcaaaaaagaaaactactacgaagtgaatagcaagtgctatgaggaagctaagaagctgaagaagatcagcaaccaggccgagtttatcgcctccttctacaacaacgatctgatcaagatcaacggcgagctgtatagagtgatcggcgtgaacaacgacctgctgaaccggatcgaagtgaacatgatcgacatcacctaccgcgagtacctggaaaacatgaacgacaagaggccccccaggatcattaagacaatcgcctccaagacccagagcattaagaagtacagcacagacattctgggcaacctgtatgaagtgaaatctaagaagcaccctcagatcatcaaaaagggcaaaaggccggcggccacgaaaaaggccggccaggcaaaaaagaaaaagggatcctacccatacgatgttccagattacgcttacccatacgatgttccagattacgcttacccatacgatgttccagattacgcttaagaattcctagagctcgctgatcagcctcgactgtgccttctagttgccagccatctgttgtttgcccctcccccgtgccttccttgaccctggaaggtgccactcccactgtcctttcctaataaaatgaggaaattgcatcgcattgtctgagtaggtgtcattctattctggggggtggggtggggcaggacagcaagggggaggattgggaagagaatagcaggcatgctggggagggccgcaggaacccctagtgatggagttggccactccctctctgcgcgctcgctcgctcactgaggccgggcgaccaaaggtcgcccgacgcccgggctttgcccgggcggcctcagtgagcgagcgagcgcgcagctgcctgcaggggcgcctgatgcggtattttctccttacgcatctgtgcggtatttcacaccgcatacgtcaaagcaaccatagtacgcgccctgtagcggcgcattaagcgcggcgggtgtggtggttacgcgcagcgtgaccgctacacttgccagcgccttagcgcccgctcctttcgctttcttcccttcctttctcgccacgttcgccggctttccccgtcaagctctaaatcgggggctccctttagggttccgatttagtgctttacggcacctcgaccccaaaaaacttgatttgggtgatggttcacgtagtgggccatcgccctgatagacggtttttcgccctttgacgttggagtccacgttctttaatagtggactcttgttccaaactggaacaacactcaactctatctcgggctattcttttgatttataagggattttgccgatttcggtctattggttaaaaaatgagctgatttaacaaaaatttaacgcgaattttaacaaaatattaacgtttacaattttatggtgcactctcagtacaatctgctctgatgccgcatagttaagccagccccgacacccgccaacacccgctgacgcgccctgacgggcttgtctgctcccggcatccgcttacagacaagctgtgaccgtctccgggagctgcatgtgtcagaggttttcaccgtcatcaccgaaacgcgcgagacgaaagggcctcgtgatacgcctatttttataggttaatgtcatgataataatggtttcttagacgtcaggtggcacttttcggggaaatgtgcgcggaacccctatttgtttatttttctaaatacattcaaatatgtatccgctcatgagacaataaccctgataaatgcttcaataatattgaaaaaggaagagtatgagtattcaacatttccgtgtcgcccttattcccttttttgcggcattttgccttcctgtttttgctcacccagaaacgctggtgaaagtaaaagatgctgaagatcagttgggtgcacgagtgggttacatcgaactggatctcaacagcggtaagatccttgagagttttcgccccgaagaacgttttccaatgatgagcacttttaaagttctgctatgtggcgcggtattatcccgtattgacgccgggcaagagcaactcggtcgccgcatacactattctcagaatgacttggttgagtactcaccagtcacagaaaagcatcttacggatggcatgacagtaagagaattatgcagtgctgccataaccatgagtgataacactgcggccaacttacttctgacaacgatcggaggaccgaaggagctaaccgcttttttgcacaacatgggggatcatgtaactcgccttgatcgttgggaaccggagctgaatgaagccataccaaacgacgagcgtgacaccacgatgcctgtagcaatggcaacaacgttgcgcaaactattaactggcgaactacttactctagcttcccggcaacaattaatagactggatggaggcggataaagttgcaggaccacttctgcgctcggcccttccggctggctggtttattgctgataaatctggagccggtgagcgtggaagccgcggtatcattgcagcactggggccagatggtaagccctcccgtatcgtagttatctacacgacggggagtcaggcaactatggatgaacgaaatagacagatcgctgagataggtgcctcactgattaagcattggtaactgtcagaccaagtttactcatatatactttagattgatttaaaacttcatttttaatttaaaaggatctaggtgaagatcctttttgataatctcatgaccaaaatcccttaacgtgagttttcgttccactgagcgtcagaccccgtagaaaagatcaaaggatcttcttgagatcctttttttctgcgcgtaatctgctgcttgcaaacaaaaaaaccaccgctaccagcggtggtttgtttgccggatcaagagctaccaactctttttccgaaggtaactggcttcagcagagcgcagataccaaatactgttcttctagtgtagccgtagttaggccaccacttcaagaactctgtagcaccgcctacatacctcgctctgctaatcctgttaccagtggctgctgccagtggcgataagtcgtgtcttaccgggttggactcaagacgatagttaccggataaggcgcagcggtcgggctgaacggggggttcgtgcacacagcccagcttggagcgaacgacctacaccgaactgagatacctacagcgtgagctatgagaaagcgccacgcttcccgaagggagaaaggcggacaggtatccggtaagcggcagggtcggaacaggagagcgcacgagggagcttccagggggaaacgcctggtatctttatagtcctgtcgggtttcgccacctctgacttgagcgtcgatttttgtgatgctcgtcaggggggcggagcctatggaaaaacgccagcaacgcggcctttttacggttcctggccttttgctggccttttgctcacatgt

SEQ ID NO: 6 - RNA, 7089 nt, synthetic construct
  source 1..7089: mol_type = other RNA
cctgcaggcagctgcgcgctcgctcgctcactgaggccgcccgggcgtcgggcgacctttggtcgcccggcctcagtgagcgagcgagcgcgcagagagggagtggccaactccatcactaggggttcctgcggcctctagactcgaggcgttgacattgattattgactagttattaatagtaatcaattacggggtcattagttcatagcccatatatggagttccgcgttacataacttacggtaaatggcccgcctggctgaccgcccaacgacccccgcccattgacgtcaataatgacgtatgttcccatagtaacgccaatagggactttccattgacgtcaatgggtggagtatttacggtaaactgcccacttggcagtacatcaagtgtatcatatgccaagtacgccccctattgacgtcaatgacggtaaatggcccgcctggcattatgcccagtacatgaccttatgggactttcctacttggcagtacatctacgtattagtcatcgctattaccatggtgatgcggttttggcagtacatcaatgggcgtggatagcggtttgactcacggggatttccaagtctccaccccattgacgtcaatgggagtttgttttggcaccaaaatcaacgggactttccaaaatgtcgtaacaactccgccccattgacgcaaatgggcggtaggcgtgtacggtgggaggtctatataagcagagctctctggctaactaccggtgccaccatggccccaaagaagaagcggaaggtcggtatccacggagtcccagcagccaagcggaactacatcctgggcctggacatcggcatcaccagcgtgggctacggcatcatcgactacgagacacgggacgtgatcgatgccggcgtgcggctgttcaaagaggccaacgtggaaaacaacgagggcaggcggagcaagagaggcgccagaaggctgaagcggcggaggcggcatagaatccagagagtgaagaagctgctgttcgactacaacctgctgaccgaccacagcgagctgagcggcatcaacccctacgaggccagagtgaagggcctgagccagaagctgagcgaggaagagttctctgccgccctgctgcacctggccaagagaagaggcgtgcacaacgtgaacgaggtggaagaggacaccggcaacgagctgtccaccaaagagcagatcagccggaacagcaaggccctggaagagaaatacgtggccgaactgcagctggaacggctgaagaaagacggcgaagtgcggggcagcatcaacagattcaagaccagcgactacgtgaaagaagccaaacagctgctgaaggtgcagaaggcctaccaccagctggaccagagcttcatcgacacctacatcgacctgctggaaacccggcggacctactatgagggacctggcgagggcagccccttcggctggaaggacatcaaagaatggtacgagatgctgatgggccactgcacctacttccccgaggaactgcggagcgtgaagtacgcctacaacgccgacctgtacaacgccctgaacgacctgaacaatctcgtgatcaccagggacgagaacgagaagctggaatattacgagaagttccagatcatcgagaacgtgttcaagcagaagaagaagcccaccctgaagcagatcgccaaagaaatcctcgtgaacgaagaggatattaagggctacagagtgaccagcaccggcaagcccgagttcaccaacctgaaggtgtaccacgacatcaaggacattaccgcccggaaagagattattgagaacgccgagctgctggatcagattgccaagatcctgaccatctaccagagcagcgaggacatccaggaagaactgaccaatctgaactccgagctgacccaggaagagatcgagcagatctctaatctgaagggctataccggcacccacaacctgagcctgaaggccatcaacctgatcctggacgagctgtggcacaccaacgacaaccagatcgctatcttcaaccggctgaagctggtgcccaagaaggtggacctgtcccagcagaaagagatccccaccaccctggtggacgacttcatcctgagccccgtcgtgaagagaagcttcatccagagcatcaaagtgatcaacgccatcatcaagaagtacggcctgcccaacgacatcattatcgagctggcccgcgagaagaactccaaggacgcccagaaaatgatcaacgagatgcagaagcggaaccggcagaccaacgagcggatcgaggaaatcatccggaccaccggcaaagagaacgccaagtacctgatcgagaagatcaagctgcacgacatgcaggaaggcaagtgcctgtacagcctggaagccatccctctggaagatctgctgaacaaccccttcaactatgaggtggaccacatcatccccagaagcgtgtccttcgacaacagcttcaacaacaaggtgctcgtgaagcaggaagaaaacagcaagaagggcaaccggaccccattccagtacctgagcagcagcgacagcaagatcagctacgaaaccttcaagaagcacatcctgaatctggccaagggcaagggcagaatcagcaagaccaagaaagagtatctgctggaagaacgggacatcaacaggttctccgtgcagaaagacttcatcaaccggaacctggtggataccagatacgccaccagaggcctgatgaacctgctgcggagctacttcagagtgaacaacctggacgtgaaagtgaagtccatcaatggcggcttcaccagctttctgcggcggaagtggaagtttaagaaagagcggaacaaggggtacaagcaccacgccgaggacgccctgatcattgccaacgccgatttcatcttcaaagagtggaagaaactggacaaggccaaaaaagtgatggaaaaccagatgttcgaggaaaagcaggccgagagcatgcccgagatcgaaaccgagcaggagtacaaagagatcttcatcaccccccaccagatcaagcacattaaggacttcaaggactacaagtacagccaccgggtggacaagaagcctaatagagagctgattaacgacaccctgtactccacccggaaggacgacaagggcaacaccctgatcgtgaacaatctgaacggcctgtacgacaaggacaatgacaagctgaaaaagctgatcaacaagagccccgaaaagctgctgatgtaccaccacgacccccagacctaccagaaactgaagctgattatggaacagtacggcgacgagaagaatcccctgtacaagtactacgaggaaaccgggaactacctgaccaagtactccaaaaaggacaacggccccgtgatcaagaagattaagtattacggcaacaaactgaacgcccatctggacatcaccgacgactaccccaacagcagaaacaaggtcgtgaagctgtccctgaagccctacagattcgacgtgtacctggacaatggcgtgtacaagttcgtgaccgtgaagaatctggatgtgatcaaaaaagaaaactactacgaagtgaatagcaagtgctatgaggaagctaagaagctgaagaagatcagcaaccaggccgagtttatcgcctccttctacaacaacgatctgatcaagatcaacggcgagctgtatagagtgatcggcgtgaacaacgacctgctgaaccggatcgaagtgaacatgatcgacatcacctaccgcgagtacctggaaaacatgaacgacaagaggccccccaggatcattaagacaatcgcctccaagacccagagcattaagaagtacagcacagacattctgggcaacctgtatgaagtgaaatctaagaagcaccctcagatcatcaaaaagggcaaaaggccggcggccacgaaaaaggccggccaggcaaaaaagaaaaagggatcctacccatacgatgttccagattacgcttacccatacgatgttccagattacgcttacccatacgatgttccagattacgcttaagaattcctagagctcgctgatcagcctcgactgtgccttctagttgccagccatctgttgtttgcccctcccccgtgccttccttgaccctggaaggtgccactcccactgtcctttcctaataaaatgaggaaattgcatcgcattgtctgagtaggtgtcattctattctggggggtggggtggggcaggacagcaagggggaggattgggaagagaatagcaggcatgctggggagggccgcaggaacccctagtgatggagttggccactccctctctgcgcgctcgctcgctcactgaggccgggcgaccaaaggtcgcccgacgcccgggctttgcccgggcggcctcagtgagcgagcgagcgcgcagctgcctgcaggggcgcctgatgcggtattttctccttacgcatctgtgcggtatttcacaccgcatacgtcaaagcaaccatagtacgcgccctgtagcggcgcattaagcgcggcgggtgtggtggttacgcgcagcgtgaccgctacacttgccagcgccttagcgcccgctcctttcgctttcttcccttcctttctcgccacgttcgccggctttccccgtcaagctctaaatcgggggctccctttagggttccgatttagtgctttacggcacctcgaccccaaaaaacttgatttgggtgatggttcacgtagtgggccatcgccctgatagacggtttttcgccctttgacgttggagtccacgttctttaatagtggactcttgttccaaactggaacaacactcaactctatctcgggctattcttttgatttataagggattttgccgatttcggtctattggttaaaaaatgagctgatttaacaaaaatttaacgcgaattttaacaaaatattaacgtttacaattttatggtgcactctcagtacaatctgctctgatgccgcatagttaagccagccccgacacccgccaacacccgctgacgcgccctgacgggcttgtctgctcccggcatccgcttacagacaagctgtgaccgtctccgggagctgcatgtgtcagaggttttcaccgtcatcaccgaaacgcgcgagacgaaagggcctcgtgatacgcctatttttataggttaatgtcatgataataatggtttcttagacgtcaggtggcacttttcggggaaatgtgcgcggaacccctatttgtttatttttctaaatacattcaaatatgtatccgctcatgagacaataaccctgataaatgcttcaataatattgaaaaaggaagagtatgagtattcaacatttccgtgtcgcccttattcccttttttgcggcattttgccttcctgtttttgctcacccagaaacgctggtgaaagtaaaagatgctgaagatcagttgggtgcacgagtgggttacatcgaactggatctcaacagcggtaagatccttgagagttttcgccccgaagaacgttttccaatgatgagcacttttaaagttctgctatgtggcgcggtattatcccgtattgacgccgggcaagagcaactcggtcgccgcatacactattctcagaatgacttggttgagtactcaccagtcacagaaaagcatcttacggatggcatgacagtaagagaattatgcagtgctgccataaccatgagtgataacactgcggccaacttacttctgacaacgatcggaggaccgaaggagctaaccgcttttttgcacaacatgggggatcatgtaactcgccttgatcgttgggaaccggagctgaatgaagccataccaaacgacgagcgtgacaccacgatgcctgtagcaatggcaacaacgttgcgcaaactattaactggcgaactacttactctagcttcccggcaacaattaatagactggatggaggcggataaagttgcaggaccacttctgcgctcggcccttccggctggctggtttattgctgataaatctggagccggtgagcgtggaagccgcggtatcattgcagcactggggccagatggtaagccctcccgtatcgtagttatctacacgacggggagtcaggcaactatggatgaacgaaatagacagatcgctgagataggtgcctcactgattaagcattggtaactgtcagaccaagtttactcatatatactttagattgatttaaaacttcatttttaatttaaaaggatctaggtgaagatcctttttgataatctcatgaccaaaatcccttaacgtgagttttcgttccactgagcgtcagaccccgtagaaaagatcaaaggatcttcttgagatcctttttttctgcgcgtaatctgctgcttgcaaacaaaaaaaccaccgctaccagcggtggtttgtttgccggatcaagagctaccaactctttttccgaaggtaactggcttcagcagagcgcagataccaaatactgttcttctagtgtagccgtagttaggccaccacttcaagaactctgtagcaccgcctacatacctcgctctgctaatcctgttaccagtggctgctgccagtggcgataagtcgtgtcttaccgggttggactcaagacgatagttaccggataaggcgcagcggtcgggctgaacggggggttcgtgcacacagcccagcttggagcgaacgacctacaccgaactgagatacctacagcgtgagctatgagaaagcgccacgcttcccgaagggagaaaggcggacaggtatccggtaagcggcagggtcggaacaggagagcgcacgagggagcttccagggggaaacgcctggtatctttatagtcctgtcgggtttcgccacctctgacttgagcgtcgatttttgtgatgctcgtcaggggggcggagcctatggaaaaacgccagcaacgcggcctttttacggttcctggccttttgctggccttttgctcacatgt

SEQ ID NO: 7 - RNA, 4824 nt, synthetic construct
  source 1..4824: mol_type = other RNA
cctgcaggcagctgcgcgctcgctcgctcactgaggccgcccgggcgtcgggcgacctttggtcgcccggcctcagtgagcgagcgagcgcgcagagagggagtggccaactccatcactaggggttcctgcggcctctagactcgaggcgttgacattgattattgactagttattaatagtaatcaattacggggtcattagttcatagcccatatatggagttccgcgttacataacttacggtaaatggcccgcctggctgaccgcccaacgacccccgcccattgacgtcaataatgacgtatgttcccatagtaacgccaatagggactttccattgacgtcaatgggtggagtatttacggtaaactgcccacttggcagtacatcaagtgtatcatatgccaagtacgccccctattgacgtcaatgacggtaaatggcccgcctggcattatgcccagtacatgaccttatgggactttcctacttggcagtacatctacgtattagtcatcgctattaccatggtgatgcggttttggcagtacatcaatgggcgtggatagcggtttgactcacggggatttccaagtctccaccccattgacgtcaatgggagtttgttttggcaccaaaatcaacgggactttccaaaatgtcgtaacaactccgccccattgacgcaaatgggcggtaggcgtgtacggtgggaggtctatataagcagagctctctggctaactaccggtgccaccatggtgagcaagggcgaggaggataacatggccatcatcaaggagttcatgcgcttcaaggtgcacatggagggctccgtgaacggccacgagttcgagatcgagggcgagggcgagggccgcccctacgagggcacccagaccgccaagctgaaggtgaccaagggtggccccctgcccttcgcctgggacatcctgtcccctcagttcatgtacggctccaaggcctacgtgaagcaccccgccgacatccccgactacttgaagctgtccttccccgagggcttcaagtgggagcgcgtgatgaacttcgaggacggcggcgtggtgaccgtgacccaggactcctccctgcaggacggcgagttcatctacaaggtgaagctgcgcggcaccaacttcccctccgacggccccgtaatgcagaagaagaccatgggctgggaggcctcctccgagcggatgtaccccgaggacggcgccctgaagggcgagatcaagcagaggctgaagctgaaggacggcggccactacgacgctgaggtcaagaccacctacaaggccaagaagcccgtgcagctgcccggcgcctacaacgtcaacatcaagttggacatcacctcccacaacgaggactacaccatcgtggaacagtacgaacgcgccgagggccgccactccaccggcggcatggacgagctgtacaagtaagaattcctagagctcgctgatcagcctcgactgtgccttctagttgccagccatctgttgtttgcccctcccccgtgccttccttgaccctggaaggtgccactcccactgtcctttcctaataaaatgaggaaattgcatcgcattgtctgagtaggtgtcattctattctggggggtggggtggggcaggacagcaagggggaggattgggaagagaatagcaggcatgctggggaggtacctgagggcctatttcccatgattccttcatatttgcatatacgatacaaggctgttagagagataattggaattaatttgactgtaaacacaaagatattagtacaaaatacgtgacgtagaaagtaataatttcttgggtagtttgcagttttaaaattatgttttaaaatggactatcatatgcttaccgtaacttgaaagtatttcgatttcttggctttatatatcttgtggaaaggacgaaacacccgctgatgtcggccgtctgccgtttaagtactctgtgctggaaacagcacagaatctacttaaacaaggcaaaatgccgtgtttatctcgtcaacttgttggcgagatttttgcggccgcaggaacccctagtgatggagttggccactccctctctgcgcgctcgctcgctcactgaggccgggcgaccaaaggtcgcccgacgcccgggctttgcccgggcggcctcagtgagcgagcgagcgcgcagctgcctgcaggggcgcctgatgcggtattttctccttacgcatctgtgcggtatttcacaccgcatacgtcaaagcaaccatagtacgcgccctgtagcggcgcattaagcgcggcgggtgtggtggttacgcgcagcgtgaccgctacacttgccagcgccttagcgcccgctcctttcgctttcttcccttcctttctcgccacgttcgccggctttccccgtcaagctctaaatcgggggctccctttagggttccgatttagtgctttacggcacctcgaccccaaaaaacttgatttgggtgatggttcacgtagtgggccatcgccctgatagacggtttttcgccctttgacgttggagtccacgttctttaatagtggactcttgttccaaactggaacaacactcaactctatctcgggctattcttttgatttataagggattttgccgatttcggtctattggttaaaaaatgagctgatttaacaaaaatttaacgcgaattttaacaaaatattaacgtttacaattttatggtgcactctcagtacaatctgctctgatgccgcatagttaagccagccccgacacccgccaacacccgctgacgcgccctgacgggcttgtctgctcccggcatccgcttacagacaagctgtgaccgtctccgggagctgcatgtgtcagaggttttcaccgtcatcaccgaaacgcgcgagacgaaagggcctcgtgatacgcctatttttataggttaatgtcatgataataatggtttcttagacgtcaggtggcacttttcggggaaatgtgcgcggaacccctatttgtttatttttctaaatacattcaaatatgtatccgctcatgagacaataaccctgataaatgcttcaataatattgaaaaaggaagagtatgagtattcaacatttccgtgtcgcccttattcccttttttgcggcattttgccttcctgtttttgctcacccagaaacgctggtgaaagtaaaagatgctgaagatcagttgggtgcacgagtgggttacatcgaactggatctcaacagcggtaagatccttgagagttttcgccccgaagaacgttttccaatgatgagcacttttaaagttctgctatgtggcgcggtattatcccgtattgacgccgggcaagagcaactcggtcgccgcatacactattctcagaatgacttggttgagtactcaccagtcacagaaaagcatcttacggatggcatgacagtaagagaattatgcagtgctgccataaccatgagtgataacactgcggccaacttacttctgacaacgatcggaggaccgaaggagctaaccgcttttttgcacaacatgggggatcatgtaactcgccttgatcgttgggaaccggagctgaatgaagccataccaaacgacgagcgtgacaccacgatgcctgtagcaatggcaacaacgttgcgcaaactattaactggcgaactacttactctagcttcccggcaacaattaatagactggatggaggcggataaagttgcaggaccacttctgcgctcggcccttccggctggctggtttattgctgataaatctggagccggtgagcgtggaagccgcggtatcattgcagcactggggccagatggtaagccctcccgtatcgtagttatctacacgacggggagtcaggcaactatggatgaacgaaatagacagatcgctgagataggtgcctcactgattaagcattggtaactgtcagaccaagtttactcatatatactttagattgatttaaaacttcatttttaatttaaaaggatctaggtgaagatcctttttgataatctcatgaccaaaatcccttaacgtgagttttcgttccactgagcgtcagaccccgtagaaaagatcaaaggatcttcttgagatcctttttttctgcgcgtaatctgctgcttgcaaacaaaaaaaccaccgctaccagcggtggtttgtttgccggatcaagagctaccaactctttttccgaaggtaactggcttcagcagagcgcagataccaaatactgttcttctagtgtagccgtagttaggccaccacttcaagaactctgtagcaccgcctacatacctcgctctgctaatcctgttaccagtggctgctgccagtggcgataagtcgtgtcttaccgggttggactcaagacgatagttaccggataaggcgcagcggtcgggctgaacggggggttcgtgcacacagcccagcttggagcgaacgacctacaccgaactgagatacctacagcgtgagctatgagaaagcgccacgcttcccgaagggagaaaggcggacaggtatccggtaagcggcagggtcggaacaggagagcgcacgagggagcttccagggggaaacgcctggtatctttatagtcctgtcgggtttcgccacctctgacttgagcgtcgatttttgtgatgctcgtcaggggggcggagcctatggaaaaacgccagcaacgcggcctttttacggttcctggccttttgctggccttttgctcacatgt

SEQ ID NO: 8 - RNA, 4824 nt, synthetic construct
  source 1..4824: mol_type = other RNA
cctgcaggcagctgcgcgctcgctcgctcactgaggccgcccgggcgtcgggcgacctttggtcgcccggcctcagtgagcgagcgagcgcgcagagagggagtggccaactccatcactaggggttcctgcggcctctagactcgaggcgttgacattgattattgactagttattaatagtaatcaattacggggtcattagttcatagcccatatatggagttccgcgttacataacttacggtaaatggcccgcctggctgaccgcccaacgacccccgcccattgacgtcaataatgacgtatgttcccatagtaacgccaatagggactttccattgacgtcaatgggtggagtatttacggtaaactgcccacttggcagtacatcaagtgtatcatatgccaagtacgccccctattgacgtcaatgacggtaaatggcccgcctggcattatgcccagtacatgaccttatgggactttcctacttggcagtacatctacgtattagtcatcgctattaccatggtgatgcggttttggcagtacatcaatgggcgtggatagcggtttgactcacggggatttccaagtctccaccccattgacgtcaatgggagtttgttttggcaccaaaatcaacgggactttccaaaatgtcgtaacaactccgccccattgacgcaaatgggcggtaggcgtgtacggtgggaggtctatataagcagagctctctggctaactaccggtgccaccatggtgagcaagggcgaggaggataacatggccatcatcaaggagttcatgcgcttcaaggtgcacatggagggctccgtgaacggccacgagttcgagatcgagggcgagggcgagggccgcccctacgagggcacccagaccgccaagctgaaggtgaccaagggtggccccctgcccttcgcctgggacatcctgtcccctcagttcatgtacggctccaaggcctacgtgaagcaccccgccgacatccccgactacttgaagctgtccttccccgagggcttcaagtgggagcgcgtgatgaacttcgaggacggcggcgtggtgaccgtgacccaggactcctccctgcaggacggcgagttcatctacaaggtgaagctgcgcggcaccaacttcccctccgacggccccgtaatgcagaagaagaccatgggctgggaggcctcctccgagcggatgtaccccgaggacggcgccctgaagggcgagatcaagcagaggctgaagctgaaggacggcggccactacgacgctgaggtcaagaccacctacaaggccaagaagcccgtgcagctgcccggcgcctacaacgtcaacatcaagttggacatcacctcccacaacgaggactacaccatcgtggaacagtacgaacgcgccgagggccgccactccaccggcggcatggacgagctgtacaagtaagaattcctagagctcgctgatcagcctcgactgtgccttctagttgccagccatctgttgtttgcccctcccccgtgccttccttgaccctggaaggtgccactcccactgtcctttcctaataaaatgaggaaattgcatcgcattgtctgagtaggtgtcattctattctggggggtggggtggggcaggacagcaagggggaggattgggaagagaatagcaggcatgctggggaggtacctgagggcctatttcccatgattccttcatatttgcatatacgatacaaggctgttagagagataattggaattaatttgactgtaaacacaaagatattagtacaaaatacgtgacgtagaaagtaataatttcttgggtagtttgcagttttaaaattatgttttaaaatggactatcatatgcttaccgtaacttgaaagtatttcgatttcttggctttatatatcttgtggaaaggacgaaacaccttccacgggtcacgaagaaaagtttaagtactctgtgctggaaacagcacagaatctacttaaacaaggcaaaatgccgtgtttatctcgtcaacttgttggcgagatttttgcggccgcaggaacccctagtgatggagttggccactccctctctgcgcgctcgctcgctcactgaggccgggcgaccaaaggtcgcccgacgcccgggctttgcccgggcggcctcagtgagcgagcgagcgcgcagctgcctgcaggggcgcctgatgcggtattttctccttacgcatctgtgcggtatttcacaccgcatacgtcaaagcaaccatagtacgcgccctgtagcggcgcattaagcgcggcgggtgtggtggttacgcgcagcgtgaccgctacacttgccagcgccttagcgcccgctcctttcgctttcttcccttcctttctcgccacgttcgccggctttccccgtcaagctctaaatcgggggctccctttagggttccgatttagtgctttacggcacctcgaccccaaaaaacttgatttgggtgatggttcacgtagtgggccatcgccctgatagacggtttttcgccctttgacgttggagtccacgttctttaatagtggactcttgttccaaactggaacaacactcaactctatctcgggctattcttttgatttataagggattttgccgatttcggtctattggttaaaaaatgagctgatttaacaaaaatttaacgcgaattttaacaaaatattaacgtttacaattttatggtgcactctcagtacaatctgctctgatgccgcatagttaagccagccccgacacccgccaacacccgctgacgcgccctgacgggcttgtctgctcccggcatccgcttacagacaagctgtgaccgtctccgggagctgcatgtgtcagaggttttcaccgtcatcaccgaaacgcgcgagacgaaagggcctcgtgatacgcctatttttataggttaatgtcatgataataatggtttcttagacgtcaggtggcacttttcggggaaatgtgcgcggaacccctatttgtttatttttctaaatacattcaaatatgtatccgctcatgagacaataaccctgataaatgcttcaataatattgaaaaaggaagagtatgagtattcaacatttccgtgtcgcccttattcccttttttgcggcattttgccttcctgtttttgctcacccagaaacgctggtgaaagtaaaagatgctgaagatcagttgggtgcacgagtgggttacatcgaactggatctcaacagcggtaagatccttgagagttttcgccccgaagaacgttttccaatgatgagcacttttaaagttctgctatgtggcgcggtattatcccgtattgacgccgggcaagagcaactcggtcgccgcatacactattctcagaatgacttggttgagtactcaccagtcacagaaaagcatcttacggatggcatgacagtaagagaattatgcagtgctgccataaccatgagtgataacactgcggccaacttacttctgacaacgatcggaggaccgaaggagctaaccgcttttttgcacaacatgggggatcatgtaactcgccttgatcgttgggaaccggagctgaatgaagccataccaaacgacgagcgtgacaccacgatgcctgtagcaatggcaacaacgttgcgcaaactattaactggcgaactacttactctagcttcccggcaacaattaatagactggatggaggcggataaagttgcaggaccacttctgcgctcggcccttccggctggctggtttattgctgataaatctggagccggtgagcgtggaagccgcggtatcattgcagcactggggccagatggtaagccctcccgtatcgtagttatctacacgacggggagtcaggcaactatggatgaacgaaatagacagatcgctgagataggtgcctcactgattaagcattggtaactgtcagaccaagtttactcatatatactttagattgatttaaaacttcatttttaatttaaaaggatctaggtgaagatcctttttgataatctcatgaccaaaatcccttaacgtgagttttcgttccactgagcgtcagaccccgtagaaaagatcaaaggatcttcttgagatcctttttttctgcgcgtaatctgctgcttgcaaacaaaaaaaccaccgctaccagcggtggtttgtttgccggatcaagagctaccaactctttttccgaaggtaactggcttcagcagagcgcagataccaaatactgttcttctagtgtagccgtagttaggccaccacttcaagaactctgtagcaccgcctacatacctcgctctgctaatcctgttaccagtggctgctgccagtggcgataagtcgtgtcttaccgggttggactcaagacgatagttaccggataaggcgcagcggtcgggctgaacggggggttcgtgcacacagcccagcttggagcgaacgacctacaccgaactgagatacctacagcgtgagctatgagaaagcgccacgcttcccgaagggagaaaggcggacaggtatccggtaagcggcagggtcggaacaggagagcgcacgagggagcttccagggggaaacgcctggtatctttatagtcctgtcgggtttcgccacctctgacttgagcgtcgatttttgtgatgctcgtcaggggggcggagcctatggaaaaacgccagcaacgcggcctttttacggttcctggccttttgctggccttttgctcacatgt

SEQ ID NO: 9 - RNA, 4824 nt, synthetic construct
  source 1..4824: mol_type = other RNA
cctgcaggcagctgcgcgctcgctcgctcactgaggccgcccgggcgtcgggcgacctttggtcgcccggcctcagtgagcgagcgagcgcgcagagagggagtggccaactccatcactaggggttcctgcggcctctagactcgaggcgttgacattgattattgactagttattaatagtaatcaattacggggtcattagttcatagcccatatatggagttccgcgttacataacttacggtaaatggcccgcctggctgaccgcccaacgacccccgcccattgacgtcaataatgacgtatgttcccatagtaacgccaatagggactttccattgacgtcaatgggtggagtatttacggtaaactgcccacttggcagtacatcaagtgtatcatatgccaagtacgccccctattgacgtcaatgacggtaaatggcccgcctggcattatgcccagtacatgaccttatgggactttcctacttggcagtacatctacgtattagtcatcgctattaccatggtgatgcggttttggcagtacatcaatgggcgtggatagcggtttgactcacggggatttccaagtctccaccccattgacgtcaatgggagtttgttttggcaccaaaatcaacgggactttccaaaatgtcgtaacaactccgccccattgacgcaaatgggcggtaggcgtgtacggtgggaggtctatataagcagagctctctggctaactaccggtgccaccatggtgagcaagggcgaggaggataacatggccatcatcaaggagttcatgcgcttcaaggtgcacatggagggctccgtgaacggccacgagttcgagatcgagggcgagggcgagggccgcccctacgagggcacccagaccgccaagctgaaggtgaccaagggtggccccctgcccttcgcctgggacatcctgtcccctcagttcatgtacggctccaaggcctacgtgaagcaccccgccgacatccccgactacttgaagctgtccttccccgagggcttcaagtgggagcgcgtgatgaacttcgaggacggcggcgtggtgaccgtgacccaggactcctccctgcaggacggcgagttcatctacaaggtgaagctgcgcggcaccaacttcccctccgacggccccgtaatgcagaagaagaccatgggctgggaggcctcctccgagcggatgtaccccgaggacggcgccctgaagggcgagatcaagcagaggctgaagctgaaggacggcggccactacgacgctgaggtcaagaccacctacaaggccaagaagcccgtgcagctgcccggcgcctacaacgtcaacatcaagttggacatcacctcccacaacgaggactacaccatcgtggaacagtacgaacgcgccgagggccgccactccaccggcggcatggacgagctgtacaagtaagaattcctagagctcgctgatcagcctcgactgtgccttctagttgccagccatctgttgtttgcccctcccccgtgccttccttgaccctggaaggtgccactcccactgtcctttcctaataaaatgaggaaattgcatcgcattgtctgagtaggtgtcattctattctggggggtggggtggggcaggacagcaagggggaggattgggaagagaatagcaggcatgctggggaggtacctgagggcctatttcccatgattccttcatatttgcatatacgatacaaggctgttagagagataattggaattaatttgactgtaaacacaaagatattagtacaaaatacgtgacgtagaaagtaataatttcttgggtagtttgcagttttaaaattatgttttaaaatggactatcatatgcttaccgtaacttgaaagtatttcgatttcttggctttatatatcttgtggaaaggacgaaacaccagcagaattatgggcctctcagtttaagtactctgtgctggaaacagcacagaatctacttaaacaaggcaaaatgccgtgtttatctcgtcaacttgttggcgagatttttgcggccgcaggaacccctagtgatggagttggccactccctctctgcgcgctcgctcgctcactgaggccgggcgaccaaaggtcgcccgacgcccgggctttgcccgggcggcctcagtgagcgagcgagcgcgcagctgcctgcaggggcgcctgatgcggtattttctccttacgcatctgtgcggtatttcacaccgcatacgtcaaagcaaccatagtacgcgccctgtagcggcgcattaagcgcggcgggtgtggtggttacgcgcagcgtgaccgctacacttgccagcgccttagcgcccgctcctttcgctttcttcccttcctttctcgccacgttcgccggctttccccgtcaagctctaaatcgggggctccctttagggttccgatttagtgctttacggcacctcgaccccaaaaaacttgatttgggtgatggttcacgtagtgggccatcgccctgatagacggtttttcgccctttgacgttggagtccacgttctttaatagtggactcttgttccaaactggaacaacactcaactctatctcgggctattcttttgatttataagggattttgccgatttcggtctattggttaaaaaatgagctgatttaacaaaaatttaacgcgaattttaacaaaatattaacgtttacaattttatggtgcactctcagtacaatctgctctgatgccgcatagttaagccagccccgacacccgccaacacccgctgacgcgccctgacgggcttgtctgctcccggcatccgcttacagacaagctgtgaccgtctccgggagctgcatgtgtcagaggttttcaccgtcatcaccgaaacgcgcgagacgaaagggcctcgtgatacgcctatttttataggttaatgtcatgataataatggtttcttagacgtcaggtggcacttttcggggaaatgtgcgcggaacccctatttgtttatttttctaaatacattcaaatatgtatccgctcatgagacaataaccctgataaatgcttcaataatattgaaaaaggaagagtatgagtattcaacatttccgtgtcgcccttattcccttttttgcggcattttgccttcctgtttttgctcacccagaaacgctggtgaaagtaaaagatgctgaagatcagttgggtgcacgagtgggttacatcgaactggatctcaacagcggtaagatccttgagagttttcgccccgaagaacgttttccaatgatgagcacttttaaagttctgctatgtggcgcggtattatcccgtattgacgccgggcaagagcaactcggtcgccgcatacactattctcagaatgacttggttgagtactcaccagtcacagaaaagcatcttacggatggcatgacagtaagagaattatgcagtgctgccataaccatgagtgataacactgcggccaacttacttctgacaacgatcggaggaccgaaggagctaaccgcttttttgcacaacatgggggatcatgtaactcgccttgatcgttgggaaccggagctgaatgaagccataccaaacgacgagcgtgacaccacgatgcctgtagcaatggcaacaacgttgcgcaaactattaactggcgaactacttactctagcttcccggcaacaattaatagactggatggaggcggataaagttgcaggaccacttctgcgctcggcccttccggctggctggtttattgctgataaatctggagccggtgagcgtggaagccgcggtatcattgcagcactggggccagatggtaagccctcccgtatcgtagttatctacacgacggggagtcaggcaactatggatgaacgaaatagacagatcgctgagataggtgcctcactgattaagcattggtaactgtcagaccaagtttactcatatatactttagattgatttaaaacttcatttttaatttaaaaggatctaggtgaagatcctttttgataatctcatgaccaaaatcccttaacgtgagttttcgttccactgagcgtcagaccccgtagaaaagatcaaaggatcttcttgagatcctttttttctgcgcgtaatctgctgcttgcaaacaaaaaaaccaccgctaccagcggtggtttgtttgccggatcaagagctaccaactctttttccgaaggtaactggcttcagcagagcgcagataccaaatactgttcttctagtgtagccgtagttaggccaccacttcaagaactctgtagcaccgcctacatacctcgctctgctaatcctgttaccagtggctgctgccagtggcgataagtcgtgtcttaccgggttggactcaagacgatagttaccggataaggcgcagcggtcgggctgaacggggggttcgtgcacacagcccagcttggagcgaacgacctacaccgaactgagatacctacagcgtgagctatgagaaagcgccacgcttcccgaagggagaaaggcggacaggtatccggtaagcggcagggtcggaacaggagagcgcacgagggagcttccagggggaaacgcctggtatctttatagtcctgtcgggtttcgccacctctgacttgagcgtcgatttttgtgatgctcgtcaggggggcggagcctatggaaaaacgccagcaacgcggcctttttacggttcctggccttttgctggccttttgctcacatgt

SEQ ID NO: 10 - DNA, 7168 bp, synthetic construct
  source 1..7168: mol_type = other DNA
gtcttgtccatggagaagaagctggacttcctggtgaatatctacatgcagcggatgggcatccccccgacagagaccgaggcctactttggggccaaagagccggagccggcgccgccgtaccacagcccggaagacagccgggagcatgtcgacaggcacggctgcattgtcaagatcgtgcgctccagcagctccacgggccagaagaacttctcggcgcccccggccgcgccccctgtccagtgtccgccctccacctcctggcagccacagagccacccgcgccagggccacggcacctcccccgtgggggaccacggctccctggtgcgcatcccgccgccgcctgcccacgagcggtcgctgtccgcctacggcgggggcaaccgcgccagcatggagttcctgcggcaggaggacaccccgggctgcaggccccccgaggggaacctgcgggacagcgacacgtccatctccatcccgtccgtggaccacgaggagctggagcgttccttcagcggcttcagcatctcccagtccaaggagaacctggatgctctcaacagctgctacgcggccgtggcgccttgtgccaaagtcaggccctacattgcggagggagagtcagacaccgactccgacctctgtaccccgtgcgggcccccgccacgctcggccaccggcgagggtccctttggtgacgtgggctgggccgggcccaggaagtgaggcggcgctgggccagtggacccgcccgcggccctcctcagcacggtgcctccgaggttttgaggcgggaaccctctggggcccttttcttacagtaactgagtgtggcgggaagggtgggccctggaggggcccatgtgggctgaaggatgggggctcctggcagtgaccttttacaaaagttattttccaacaggggctggagggctgggcagggccctgtggctccaggagcagcgtgcaggagcaaggctgccctgtccactctgctcagggccgcggccgacatcagcccggtgtgaggaggggcgggagtgatgacggggtgttgccagcgtggcaacaggcggggggttgtctcagccgagcccaggggaggcacaaagggcaggcctgttccctgaggacctgcgcaaagggcgggcctgtttggtgaggacctgcggccttgggtcccggtggggtttccgggcagctacaggcgggtgtggccggccgctgtgcgtggcctctgccttcacacctgacctgcccggcgggctttcctgttccccacctcaggggcgcccaaatacagagctattggttggcgtcttctccctgtaccttctgggatctgagggctctttccatggaagccagccccgaggtggagaccttcgcctgcagccgaggagcgggtggggcctgggaaccaaactggagccagagtggacgtccagccctctggtcttggcctccagagggagggcctggctcacggtggggccagggagccggctccaaagggtcttcaaaaagggggtccttgggggctccagctgcctcgccctggcctttctgtgggtgcgtgagagccagcagcaccccagccttggagaccgggggggcaggaccccaagtcctcccctctctcctgactgccctggccgggtgccggcactgcgagacccacctggtgagcaggcctcacagttcttagccagggccccacctcgcctgtgtcccaccagtgccccgacagacctggggcagggctgggccatgatgcagcgggccaggatagcctccaccgtcagcacagggccgccctccccgcctttccggaggaaaccactcccacctcagcccagctgtgcgccctccctagctctcctgccccctggagctgatggccccttctccactgaccgattccttagcggggcctcttggggtctcgggcctcgggtgcaccgtcccatgcccgtcctgttgtgggcaccgtggcccttggggcaggcggctctaatgcgggagcgagtccctagctccagacttaagaaccagaccccgggagcatctggcatttggcgtgacggcgtcgcaggcgggcctgggctccctggagagtggcctccctgggagtgagcagggctggggtcgtgggcgcaaatactcctgcagagcaagtgcaggggagtcctgggcccgtttctcctccacctgcgttttcagtgcacttggcttggctgggaggtcctgaggccctgaggccagcaggggaaccagtcctgagggagaggactttgaaagcagcatttgagggtcgtacgcccctggctggtgggggtcctggcgctcagggtgttcggggagccatgtctggcgtccattgtggggagctgctgccctggcctctctgcctacccccagcccggccagggcactcccaggccctgtcgccattgaggtgcctccgctgggctgtctcctcacccctccctgtgctggagcctgtcccaaaaaggtgccaactgggaggcctcggaagccactgtccaggctcccactgcctgtctgctctgttcccaaaggcagcgtgtgtggcctcgggccctgcggtggcatgaagcatcccttctggtgtgggcatcgctacgtgttttgggggcagcgtttcacggcggtgcccttgctgtctcccttgggctggctcgagcctggggtccatgtccctttgccgtcccgtcatggggcagggaatccatagcggggcccacaggcaggggtatgagtgcgtcccacccaacgcagcaccagccccggccaccgctccccgtgtccccagttccgtctcagctacctggactccaggaccctggagaagggagacctggcagtggagggaggctgtgctgtgtgtccccctgcaggtgtgaccccgcctgctctttcctcccccgccaggtgtggccccgcctgctctttcctcccccaccagtatggccccacctgctctttcctccccccccaaggtgtggccccacctgttctttcctcccctgccgaggtgtgaccccacctgctctttcctccctcccagtatggccccacctgctctttcctcccccgaggtgaggccccgcctgctctttcctcccatggggccgctgaggcatgagcacctgggcacaggttggggctctgcaggatgaggaagacaggccaatcccttccctcccagaagctggccgcccagcaggagggactgaggccagactcatgtccagcaaggaacgtgtggtgtgtcccctgggaagtctctgggccctgggaagagggaaggtgcacgtcctgggatggttgcggggccctgttttgggagacaaaggggtagagggtctgtcttgggcccccccagactctagcctgagcagtgcagccacctactgccccacctcagagaagtgcagcgggaaggaggctggaggtggtgcggcgctgcctcgggtgtctgcgtgaatgagcgtggccaaggaccagtgccacctcatggcaaagagctcccgcagtgtttgttagagtgcacatccctacgtgcccactggcacacacacgtgctcacatacatgtccgcatacaggcgtacacatgcacgcttgcacacatgcacacagaccacatagcacacatgtgcactgaccacacctgtatagaccatgcacagtacacatacgtgcatacacatgcctgcatacaggcatacacatgcacgcttacatgtacacgtgcacagatcacacacatgcacacacgtgtagctcacacacagtatacacatacacaagtgcacagaccacacacagcactaacacatgcacacacaaagtgcataggccacacagcacatgcacacaggtgcacagaccacacagcacacacaagtgcacagagcacactgcacacatgcacacacacacgcgtgcatgcacactcctcgcacttccagccttggagcccttctgtctctggtctttctctttgaccctgctgagtgtaagctgcctggggaggggctacaaggagtaattgtggctttaggggtcgtggtgatgctggaatgtcaagcgccgtcgtggggtatccgactgtccgggctcctggtccgcagtggcagagcgccaggcagagcccaatcagggtctcgtgctgcccttccctcccacagcctggcagccatccagaggaggggctctaccagatgccaaggtgccccggtgtctgtatgggtgtccggttgggtcctgtgtttggtctgccctggaggtgctgggccctcctgggatgggtggctcagcctcgaatcccaggccccagcccaggcaggtgctgctgcctgttgtggtttcctggcccagcttctccttctccctctgcataaaatcacagtccgtgagtcttccagctgccaccacggctgggacacgctgggggagggctcctcccatgcctcctgcacacagccgtctgagcagggcaggtgcccaacaccccccaccggaggacacgctgcccctcagcgatgcccctaccttttggggggcctcgtctcaagcccccccttggaggctgaaatcaccccaggcactgtgagggcttctccagggggcaccctttgagctgtgggtctgatcaccccaagtcccgcccggaggagaggcacagccagggcgtgtggtttaatgtttgcccccttcggggctggaggtctcagtgtttctagattccagaccctgctgccagagagacctgctgccggagagaaggggaggaggactccagctgggctcggtcccccacagtcagggacccccataaaggacacccccttctctctagaaagagctgggctctcagctatttctagttgcttcccagaagccgaggagcagaaggagctgtgagagctttgcagaaacgcccttgtccccgccctcctgagctatgaatgccgtacagagcagaggctggggcattggcaagatcacaggttgatgctgcacagccccattgacacaaaccctcaaagcagacgtgagagggacggttcacaaagctcggacctgccgtggagggtgcccggcagacgtggcgtgagagggacggctcacgaggcttggacctgctgtggagggtgcccagcagacgtggtgtgagaggaacggctcacgagacttggacctggtggagggtgcccagcagacgtggtgtgagagggacggctcacagggcttggacctgccatggagggtgcccggcagacgtggtgtgagagggatggttcacagggcttggacctgccatggagggtgcccggcagatgtggtgggagagagatggctcatgaggcttggacctgccgtggagggtgcccagcagacgtggtatgagagggatggctcacgaggcttggacctggtggagggtgcccggcagacgtgtgagagggacggttcacaaggcttggacctgccatggagggtgcccagcagacgtggtgtgagagggacagctcacgaggcttggacctgctgtggagggtgcccagcagggggctgagctctgaggggtgggtgctcagtgcacgggtgcccccagtgtcctctgatcctgtccggtgcctcccccaacccccacacccatgcagaactcccaggtcacatgcacgtatgtccagggcatgggggtggcgtgaagaggcctggtcagggcctttaggggctgcaggacggaatggccgcctggggagcctgtgtggctgtgccgggcagccatcctgcattcccacccagcgcgcagtctccacctcggccccagcaaagcgctaagcagccggagagacagccagggcggcttcctgaaggatgtgggatggtggactccggggtcgagggaatacgcaggttcctgtccctccgggagacctagagaagctgcacacccaggagctttccatgacccgggagcatgagtgaatgggggttccagtttgctgaactttgccgtcttgtaagggtgggggctgacggccgaccctgggaggaggtgacatcgccgggggaggttgtgggcaacggtggaggaggagagacgggaggggaccatttgggatggaggggcctcttcagagttttaaaaggcgtttgtggggtggagttgagtgtgctctgggcttggacacttgccgtggtgcccctggctggccgaggagactggctctggccaggggccccgtcctgagaggtcctcagcgtctgactctcggccaggcgccagcaaggaggggccggtccccggggctaccaggcaggcacgtgcacatcgccatcgccacacgccaactccgcctgggttttacaaagtcgttgccttaatgcatgtggacaggaactccctgaggtcgccccatgccccctggctgtgccaggtacggacgccctggaccctgcgaacaggtggggcgggcgaggggcccaagggacgggctccagagacacgcgcagggcaggaggggtctcacggaggggtctcgcactgaggcgcccagagctggtggtcccgctggacgccatccctctgcccgggatccacacggcccacgtgtgcccgccatgcccgcgccccacgccattgcagtctgccatcctctggccgtgacggtggctgcagcttccccatttgcgccgttgcctctggctgtctgcacttttgttcatgctccaaagaacatttcataatgccttcagtaccgacgtacacttctgaccattttgtatgtgtccttgtgccgtagtgaccaggcctttttttggtggatgtgttaccccgcacacttcaatctcaactttgtgcaccgtccattttctagggatagacgcccagggaatgaactctagttttctaacagattagctgagatattaacttactcacacggacaggttgatgccagagccgtaagaatgcgccagtgcgggtttgcgggggacttcgggtgtggggtcctgcggccgcgatggccgtggaaggttctggggatccctgctgccacggggacgagttcggacgccaggtggacctgtgcactcagtaaaacgcagtgattcaacctgga

SEQ ID NO: 11 - DNA, 7419 bp, synthetic construct
  source 1..7419: mol_type = other DNA
cctgcaggcagctgcgcgctcgctcgctcactgaggccgcccgggcgtcgggcgacctttggtcgcccggcctcagtgagcgagcgagcgcgcagagagggagtggccaactccatcactaggggttcctgcggccttcgagttgacgcgtaggtcttgaaaggagtgggaattggctccggtgcccgtcagtgggcagagcgcacatcgcccacagtccccgagaagttggggggaggggtcggcaattgaaccggtgcctagagaaggtggcgcggggtaaactgggaaagtgatgtcgtgtactggctccgcctttttcccgagggtgggggagaaccgtatataagtgcagtagtcgccgtgaacgttctttttcgcaacgggtttgccgccagaacacaggtaccggtgccaccatgtacccatacgatgttccagattacgcttcgccgaagaaaaagcgcaaggtcgaagcgtccgacaagaagtacagcatcggcctggacatcggcaccaactctgtgggctgggccgtgatcaccgacgagtacaaggtgcccagcaagaaattcaaggtgctgggcaacaccgaccggcacagcatcaagaagaacctgatcggagccctgctgttcgacagcggcgaaacagccgaggccacccggctgaagagaaccgccagaagaagatacaccagacggaagaaccggatctgctatctgcaagagatcttcagcaacgagatggccaaggtggacgacagcttcttccacagactggaagagtccttcctggtggaagaggataagaagcacgagcggcaccccatcttcggcaacatcgtggacgaggtggcctaccacgagaagtaccccaccatctaccacctgagaaagaaactggtggacagcaccgacaaggccgacctgcggctgatctatctggccctggcccacatgatcaagttccggggccacttcctgatcgagggcgacctgaaccccgacaacagcgacgtggacaagctgttcatccagctggtgcagacctacaaccagctgttcgaggaaaaccccatcaacgccagcggcgtggacgccaaggccatcctgtctgccagactgagcaagagcagacggctggaaaatctgatcgcccagctgcccggcgagaagaagaatggcctgttcggcaacctgattgccctgagcctgggcctgacccccaacttcaagagcaacttcgacctggccgaggatgccaaactgcagctgagcaaggacacctacgacgacgacctggacaacctgctggcccagatcggcgaccagtacgccgacctgtttctggccgccaagaacctgtccgacgccatcctgctgagcgacatcctgagagtgaacaccgagatcaccaaggcccccctgagcgcctctatgatcaagagatacgacgagcaccaccaggacctgaccctgctgaaagctctcgtgcggcagcagctgcctgagaagtacaaagagattttcttcgaccagagcaagaacggctacgccggctacattgacggcggagccagccaggaagagttctacaagttcatcaagcccatcctggaaaagatggacggcaccgaggaactgctcgtgaagctgaacagagaggacctgctgcggaagcagcggaccttcgacaacggcagcatcccccaccagatccacctgggagagctgcacgccattctgcggcggcaggaagatttttacccattcctgaaggacaaccgggaaaagatcgagaagatcctgaccttccgcatcccctactacgtgggccctctggcccgagggaactctcggttcgcatggatgacaagaaagtccgaagaaacgattactccctggaattttgaggaagttgtcgataaaggtgcgtcagctcaatcgttcatcgagaggatgaccgcctttgacaagaatttaccgaacgaaaaagtattgcctaagcacagtttactttacgagtatttcacagtgtacaatgaactcacgaaagttaagtatgtcactgagggcatgcgtaaacccgcctttctaagcggagaacagaagaaagcaatagtagatctgttattcaagaccaaccgcaaagtgacagttaagcaattgaaagaggactactttaagaaaattgaatgcttcgattctgtcgagatctccggggtagaagatcgatttaatgcgtcacttggtacgtatcatgacctcctaaagataattaaagataaggacttcctggataacgaagagaatgaagatatcttagaagatatagtgttgactcttaccctctttgaagatcgggaaatgattgaggaaagactaaaaacatacgctcacctgttcgacgataaggttatgaaacagttaaagaggcgtcgctatacgggctggggagccttgtcgcggaaacttatcaacgggataagagacaagcaaagtggtaaaactattctcgattttctaaagagcgacggcttcgccaataggaactttatggccctgatccatgatgactctttaaccttcaaagaggatatacaaaaggcacaggtttccggacaaggggactcattgcacgaacatattgcgaatcttgctggttcgccagccatcaaaaagggcatactccagacagtcaaagtagtggatgagctagttaaggtcatgggacgtcacaaaccggaaaacattgtaatcgagatggcacgcgaaaatcaaacgactcagaaggggcaaaaaaacagtcgagagcggatgaagagaatagaagagggtattaaagaactgggcagccagatcttaaaggagcatcctgtggaaaatacccaattgcagaacgagaaactttacctctattacctacaaaatggaagggacatgtatgttgatcaggaactggacataaaccgtttatctgattacgacgtcgatcacattgtaccccaatcctttttgaaggacgattcaatcgacaataaagtgcttacacgctcggataagaaccgagggaaaagtgacaatgttccaagcgaggaagtcgtaaagaaaatgaagaactattggcggcagctcctaaatgcgaaactgataacgcaaagaaagttcgataacttaactaaagctgagaggggtggcttgtctgaacttgacaaggccggatttattaaacgtcagctcgtggaaacccgcgccatcacaaagcatgttgcccagatactagattcccgaatgaatacgaaatacgacgagaacgataagctgattcgggaagtcaaagtaatcactttaaagtcaaaattggtgtcggacttcagaaaggattttcaattctataaagttagggagataaataactaccaccatgcgcacgacgcttatcttaatgccgtcgtagggaccgcactcattaagaaatacccgaagctagaaagtgagtttgtgtatggtgattacaaagtttatgacgtccgtaagatgatcgcgaaaagcgaacaggagataggcaaggctacagccaaatacttcttttattctaacattatgaatttctttaagacggaaatcactctggcaaacggagagatacgcaaacgacctttaattgaaaccaatggggagacaggtgaaatcgtatgggataagggccgggacttcgcgacggtgagaaaagttttgagcatgccccaagtgaatatcgtgaaaaagaccgaggtgcagacaggcggcttcagcaaagagtctatcctgcccaagaggaacagcgataagctgatcgccagaaagaaggactgggaccctaagaagtacggcggcttcgacagccccaccgtggcctattctgtgctggtggtggccaaagtggaaaagggcaagtccaagaaactgaagagtgtgaaagagctgctggggatcaccatcatggaaagaagcagcttcgagaagaatcccatcgactttctggaagccaagggctacaaagaagtgaaaaaggacctgatcatcaagctgcctaagtactccctgttcgagctggaaaacggccggaagagaatgctggcctctgccggcgaactgcagaagggaaacgaactggccctgccctccaaatatgtgaacttcctgtacctggccagccactatgagaagctgaagggctcccccgaggataatgagcagaaacagctgtttgtggaacagcacaagcactacctggacgagatcatcgagcagatcagcgagttctccaagagagtgatcctggccgacgctaatctggacaaagtgctgtccgcctacaacaagcaccgggataagcccatcagagagcaggccgagaatatcatccacctgtttaccctgaccaatctgggagcccctgccgccttcaagtactttgacaccaccatcgaccggaagaggtacaccagcaccaaagaggtgctggacgccaccctgatccaccagagcatcaccggcctgtacgagacacggatcgacctgtctcagctgggaggcgacagccccaagaagaagagaaaggtggaggccagctaagaattcaataaaagatctttattttcattagatctgtgtgttggttttttgtgtgcggccgcaggaacccctagtgatggagttggccactccctctctgcgcgctcgctcgctcactgaggccgggcgaccaaaggtcgcccgacgcccgggctttgcccgggcggcctcagtgagcgagcgagcgcgcagctgcctgcaggggcgcctgatgcggtattttctccttacgcatctgtgcggtatttcacaccgcatacgtcaaagcaaccatagtacgcgccctgtagcggcgcattaagcgcggcgggtgtggtggttacgcgcagcgtgaccgctacacttgccagcgccttagcgcccgctcctttcgctttcttcccttcctttctcgccacgttcgccggctttccccgtcaagctctaaatcgggggctccctttagggttccgatttagtgctttacggcacctcgaccccaaaaaacttgatttgggtgatggttcacgtagtgggccatcgccctgatagacggtttttcgccctttgacgttggagtccacgttctttaatagtggactcttgttccaaactggaacaacactcaactctatctcgggctattcttttgatttataagggattttgccgatttcggtctattggttaaaaaatgagctgatttaacaaaaatttaacgcgaattttaacaaaatattaacgtttacaattttatggtgcactctcagtacaatctgctctgatgccgcatagttaagccagccccgacacccgccaacacccgctgacgcgccctgacgggcttgtctgctcccggcatccgcttacagacaagctgtgaccgtctccgggagctgcatgtgtcagaggttttcaccgtcatcaccgaaacgcgcgagacgaaagggcctcgtgatacgcctatttttataggttaatgtcatgataataatggtttcttagacgtcaggtggcacttttcggggaaatgtgcgcggaacccctatttgtttatttttctaaatacattcaaatatgtatccgctcatgagacaataaccctgataaatgcttcaataatattgaaaaaggaagagtatgagtattcaacatttccgtgtcgcccttattcccttttttgcggcattttgccttcctgtttttgctcacccagaaacgctggtgaaagtaaaagatgctgaagatcagttgggtgcacgagtgggttacatcgaactggatctcaacagcggtaagatccttgagagttttcgccccgaagaacgttttccaatgatgagcacttttaaagttctgctatgtggcgcggtattatcccgtattgacgccgggcaagagcaactcggtcgccgcatacactattctcagaatgacttggttgagtactcaccagtcacagaaaagcatcttacggatggcatgacagtaagagaattatgcagtgctgccataaccatgagtgataacactgcggccaacttacttctgacaacgatcggaggaccgaaggagctaaccgcttttttgcacaacatgggggatcatgtaactcgccttgatcgttgggaaccggagctgaatgaagccataccaaacgacgagcgtgacaccacgatgcctgtagcaatggcaacaacgttgcgcaaactattaactggcgaactacttactctagcttcccggcaacaattaatagactggatggaggcggataaagttgcaggaccacttctgcgctcggcccttccggctggctggtttattgctgataaatctggagccggtgagcgtggaagccgcggtatcattgcagcactggggccagatggtaagccctcccgtatcgtagttatctacacgacggggagtcaggcaactatggatgaacgaaatagacagatcgctgagataggtgcctcactgattaagcattggtaactgtcagaccaagtttactcatatatactttagattgatttaaaacttcatttttaatttaaaaggatctaggtgaagatcctttttgataatctcatgaccaaaatcccttaacgtgagttttcgttccactgagcgtcagaccccgtagaaaagatcaaaggatcttcttgagatcctttttttctgcgcgtaatctgctgcttgcaaacaaaaaaaccaccgctaccagcggtggtttgtttgccggatcaagagctaccaactctttttccgaaggtaactggcttcagcagagcgcagataccaaatactgttcttctagtgtagccgtagttaggccaccacttcaagaactctgtagcaccgcctacatacctcgctctgctaatcctgttaccagtggctgctgccagtggcgataagtcgtgtcttaccgggttggactcaagacgatagttaccggataaggcgcagcggtcgggctgaacggggggttcgtgcacacagcccagcttggagcgaacgacctacaccgaactgagatacctacagcgtgagctatgagaaagcgccacgcttcccgaagggagaaaggcggacaggtatccggtaagcggcagggtcggaacaggagagcgcacgagggagcttccagggggaaacgcctggtatctttatagtcctgtcgggtttcgccacctctgacttgagcgtcgatttttgtgatgctcgtcaggggggcggagcctatggaaaaacgccagcaacgcggcctttttacggttcctggccttttgctggccttttgctcacatgt

SEQ ID NO: 12 - DNA, 4824 bp, synthetic construct
  source 1..4824: mol_type = other DNA
cctgcaggcagctgcgcgctcgctcgctcactgaggccgcccgggcgtcgggcgacctttggtcgcccggcctcagtgagcgagcgagcgcgcagagagggagtggccaactccatcactaggggttcctgcggcctctagactcgaggcgttgacattgattattgactagttattaatagtaatcaattacggggtcattagttcatagcccatatatggagttccgcgttacataacttacggtaaatggcccgcctggctgaccgcccaacgacccccgcccattgacgtcaataatgacgtatgttcccatagtaacgccaatagggactttccattgacgtcaatgggtggagtatttacggtaaactgcccacttggcagtacatcaagtgtatcatatgccaagtacgccccctattgacgtcaatgacggtaaatggcccgcctggcattatgcccagtacatgaccttatgggactttcctacttggcagtacatctacgtattagtcatcgctattaccatggtgatgcggttttggcagtacatcaatgggcgtggatagcggtttgactcacggggatttccaagtctccaccccattgacgtcaatgggagtttgttttggcaccaaaatcaacgggactttccaaaatgtcgtaacaactccgccccattgacgcaaatgggcggtaggcgtgtacggtgggaggtctatataagcagagctctctggctaactaccggtgccaccatggtgagcaagggcgaggaggataacatggccatcatcaaggagttcatgcgcttcaaggtgcacatggagggctccgtgaacggccacgagttcgagatcgagggcgagggcgagggccgcccctacgagggcacccagaccgccaagctgaaggtgaccaagggtggccccctgcccttcgcctgggacatcctgtcccctcagttcatgtacggctccaaggcctacgtgaagcaccccgccgacatccccgactacttgaagctgtccttccccgagggcttcaagtgggagcgcgtgatgaacttcgaggacggcggcgtggtgaccgtgacccaggactcctccctgcaggacggcgagttcatctacaaggtgaagctgcgcggcaccaacttcccctccgacggccccgtaatgcagaagaagaccatgggctgggaggcctcctccgagcggatgtaccccgaggacggcgccctgaagggcgagatcaagcagaggctgaagctgaaggacggcggccactacgacgctgaggtcaagaccacctacaaggccaagaagcccgtgcagctgcccggcgcctacaacgtcaacatcaagttggacatcacctcccacaacgaggactacaccatcgtggaacagtacgaacgcgccgagggccgccactccaccggcggcatggacgagctgtacaagtaagaattcctagagctcgctgatcagcctcgactgtgccttctagttgccagccatctgttgtttgcccctcccccgtgccttccttgaccctggaaggtgccactcccactgtcctttcctaataaaatgaggaaattgcatcgcattgtctgagtaggtgtcattctattctggggggtggggtggggcaggacagcaagggggaggattgggaagagaatagcaggcatgctggggaggtacctgagggcctatttcccatgattccttcatatttgcatatacgatacaaggctgttagagagataattggaattaatttgactgtaaacacaaagatattagtacaaaatacgtgacgtagaaagtaataatttcttgggtagtttgcagttttaaaattatgttttaaaatggactatcatatgcttaccgtaacttgaaagtatttcgatttcttggctttatatatcttgtggaaaggacgaaacaccagcagaattatgggcctctcagtttaagtactctgtgctggaaacagcacagaatctacttaaacaaggcaaaatgccgtgtttatctcgtcaacttgttggcgagatttttgcggccgcaggaacccctagtgatggagttggccactccctctctgcgcgctcgctcgctcactgaggccgggcgaccaaaggtcgcccgacgcccgggctttgcccgggcggcctcagtgagcgagcgagcgcgcagctgcctgcaggggcgcctgatgcggtattttctccttacgcatctgtgcggtatttcacaccgcatacgtcaaagcaaccatagtacgcgccctgtagcggcgcattaagcgcggcgggtgtggtggttacgcgcagcgtgaccgctacacttgccagcgccttagcgcccgctcctttcgctttcttcccttcctttctcgccacgttcgccggctttccccgtcaagctctaaatcgggggctccctttagggttccgatttagtgctttacggcacctcgaccccaaaaaacttgatttgggtgatggttcacgtagtgggccatcgccctgatagacggtttttcgccctttgacgttggagtccacgttctttaatagtggactcttgttccaaactggaacaacactcaactctatctcgggctattcttttgatttataagggattttgccgatttcggtctattggttaaaaaatgagctgatttaacaaaaatttaacgcgaattttaacaaaatattaacgtttacaattttatggtgcactctcagtacaatctgctctgatgccgcatagttaagccagccccgacacccgccaacacccgctgacgcgccctgacgggcttgtctgctcccggcatccgcttacagacaagctgtgaccgtctccgggagctgcatgtgtcagaggttttcaccgtcatcaccgaaacgcgcgagacgaaagggcctcgtgatacgcctatttttataggttaatgtcatgataataatggtttcttagacgtcaggtggcacttttcggggaaatgtgcgcggaacccctatttgtttatttttctaaatacattcaaatatgtatccgctcatgagacaataaccctgataaatgcttcaataatattgaaaaaggaagagtatgagtattcaacatttccgtgtcgcccttattcccttttttgcggcattttgccttcctgtttttgctcacccagaaacgctggtgaaagtaaaagatgctgaagatcagttgggtgcacgagtgggttacatcgaactggatctcaacagcggtaagatccttgagagttttcgccccgaagaacgttttccaatgatgagcacttttaaagttctgctatgtggcgcggtattatcccgtattgacgccgggcaagagcaactcggtcgccgcatacactattctcagaatgacttggttgagtactcaccagtcacagaaaagcatcttacggatggcatgacagtaagagaattatgcagtgctgccataaccatgagtgataacactgcggccaacttacttctgacaacgatcggaggaccgaaggagctaaccgcttttttgcacaacatgggggatcatgtaactcgccttgatcgttgggaaccggagctgaatgaagccataccaaacgacgagcgtgacaccacgatgcctgtagcaatggcaacaacgttgcgcaaactattaactggcgaactacttactctagcttcccggcaacaattaatagactggatggaggcggataaagttgcaggaccacttctgcgctcggcccttccggctggctggtttattgctgataaatctggagccggtgagcgtggaagccgcggtatcattgcagcactggggccagatggtaagccctcccgtatcgtagttatctacacgacggggagtcaggcaactatggatgaacgaaatagacagatcgctgagataggtgcctcactgattaagcattggtaactgtcagaccaagtttactcatatatactttagattgatttaaaacttcatttttaatttaaaaggatctaggtgaagatcctttttgataatctcatgaccaaaatcccttaacgtgagttttcgttccactgagcgtcagaccccgtagaaaagatcaaaggatcttcttgagatcctttttttctgcgcgtaatctgctgcttgcaaacaaaaaaaccaccgctaccagcggtggtttgtttgccggatcaagagctaccaactctttttccgaaggtaactggcttcagcagagcgcagataccaaatactgttcttctagtgtagccgtagttaggccaccacttcaagaactctgtagcaccgcctacatacctcgctctgctaatcctgttaccagtggctgctgccagtggcgataagtcgtgtcttaccgggttggactcaagacgatagttaccggataaggcgcagcggtcgggctgaacggggggttcgtgcacacagcccagcttggagcgaacgacctacaccgaactgagatacctacagcgtgagctatgagaaagcgccacgcttcccgaagggagaaaggcggacaggtatccggtaagcggcagggtcggaacaggagagcgcacgagggagcttccagggggaaacgcctggtatctttatagtcctgtcgggtttcgccacctctgacttgagcgtcgatttttgtgatgctcgtcaggggggcggagcctatggaaaaacgccagcaacgcggcctttttacggttcctggccttttgctggccttttgctcacatgt

SEQ ID NO: 13 - DNA, 5316 bp, synthetic construct
  source 1..5316: mol_type = other DNA
cctgcaggcagctgcgcgctcgctcgctcactgaggccgcccgggcgtcgggcgacctttggtcgcccggcctcagtgagcgagcgagcgcgcagagagggagtggccaactccatcactaggggttcctgcggccattcggtacaattcacgcgtgtcgacaggcacggctgcattgtcaagatcgtgcgctccagcagctccacgggccagaagaacttctcggcgcccccggccgcgccccctgtccagtgtccgccctccacctcctggcagccacagagccacccgcgccagggccacggcgcctcccccgtgggggaccacggctccctggtgcgcatcccgccgccgcctgcccacgagcggtcgctgtccgcctacggcgggggcaaccgcgccagcatggagttcctgcggcaggaggacaccccgggctgcaggccccccgaggggaaagcttgagggcctatttcccatgattccttcatatttgcatatacgatacaaggctgttagagagataattggaattaatttgactgtaaacacaaagatattagtacaaaatacgtgacgtagaaagtaataatttcttgggtagtttgcagttttaaaattatgttttaaaatggactatcatatgcttaccgtaacttgaaagtatttcgatttcttggctttatatatcttgtggaaaggacgaaacaccggagccgtggtcccccacgggtttaagagctatgctggaaacagcatagcaagtttaaataaggctagtccgttatcaacttgaaaaagtggcaccgagtcggtgcttttttggtaccaatagtaatcaattacggggtcattagttcatagcccatatatggagttccgcgttacataacttacggtaaatggcccgcctggctgaccgcccaacgacccccgcccattgacgtcaataatgacgtatgttcccatagtaacgccaatagggactttccattgacgtcaatgggtggagtatttacggtaaactgcccacttggcagtacatcaagtgtatcatatgccaagtacgccccctattgacgtcaatgacggtaaatggcccgcctggcattatgcccagtacatgaccttatgggactttcctacttggcagtacatctacgtattagtcatcgctattaccatggtgatgcggttttggcagtacatcaatgggcgtggatagcggtttgactcacggggatttccaagtctccaccccattgacgtcaatgggagtttgttttggcaccaaaatcaacgggactttccaaaatgtcgtaacaactccgccccattgacgcaaatgggcggtaggcgtgtacggtgggaggtctatataagcagagctcgtttagtgaaccaccggtgccaccatggtgagcaagggcgaggaggataacatggccatcatcaaggagttcatgcgcttcaaggtgcacatggagggctccgtgaacggccacgagttcgagatcgagggcgagggcgagggccgcccctacgagggcacccagaccgccaagctgaaggtgaccaagggtggccccctgcccttcgcctgggacatcctgtcccctcagttcatgtacggctccaaggcctacgtgaagcaccccgccgacatccccgactacttgaagctgtccttccccgagggcttcaagtgggagcgcgtgatgaacttcgaggacggcggcgtggtgaccgtgacccaggactcctccctgcaggacggcgagttcatctacaaggtgaagctgcgcggcaccaacttcccctccgacggccccgtaatgcagaagaagactatgggctgggaggcctcctccgagcggatgtaccccgaggacggcgccctgaagggcgagatcaagcagaggctgaagctgaaggacggcggccactacgacgctgaggtcaagaccacctacaaggccaagaagcccgtgcagctgcccggcgcctacaacgtcaacatcaagttggacatcacctcccacaacgaggactacaccatcgtggaacagtacgaacgcgccgagggccgccactccaccggcggcatggacgagctgtacaagtaaatcgaattccgctcgagataatcaacctctggattacaaaatttgtgaaagattgactggtattcttaactatgttgctccttttacgctatgtggatacgctgctttaatgcctttgtatcatgctattgcttcccgtatggctttcattttctcctccttgtataaatcctggttagttcttgccacggcggaactcatcgccgcctgccttgcccgctgctggacaggggctcggctgttgggcactgacaattccgtggtgtttatttgtgaaatttgtgatgctattgctttatttgtaaccatctagctttatttgtgaaatttgtgatgctattgctttatttgtaaccattataagctgcaataaacaagttaacaacaacaattgcattcattttatgtttcaggttcagggggagatgtgggaggttttttaaagcggccgcaggaacccctagtgatggagttggccactccctctctgcgcgctcgctcgctcactgaggccgggcgaccaaaggtcgcccgacgcccgggctttgcccgggcggcctcagtgagcgagcgagcgcgcagctgcctgcaggggcgcctgatgcggtattttctccttacgcatctgtgcggtatttcacaccgcatacgtcaaagcaaccatagtacgcgccctgtagcggcgcattaagcgcggcgggtgtggtggttacgcgcagcgtgaccgctacacttgccagcgccttagcgcccgctcctttcgctttcttcccttcctttctcgccacgttcgccggctttccccgtcaagctctaaatcgggggctccctttagggttccgatttagtgctttacggcacctcgaccccaaaaaacttgatttgggtgatggttcacgtagtgggccatcgccctgatagacggtttttcgccctttgacgttggagtccacgttctttaatagtggactcttgttccaaactggaacaacactcaactctatctcgggctattcttttgatttataagggattttgccgatttcggtctattggttaaaaaatgagctgatttaacaaaaatttaacgcgaattttaacaaaatattaacgtttacaattttatggtgcactctcagtacaatctgctctgatgccgcatagttaagccagccccgacacccgccaacacccgctgacgcgccctgacgggcttgtctgctcccggcatccgcttacagacaagctgtgaccgtctccgggagctgcatgtgtcagaggttttcaccgtcatcaccgaaacgcgcgagacgaaagggcctcgtgatacgcctatttttataggttaatgtcatgataataatggtttcttagacgtcaggtggcacttttcggggaaatgtgcgcggaacccctatttgtttatttttctaaatacattcaaatatgtatccgctcatgagacaataaccctgataaatgcttcaataatattgaaaaaggaagagtatgagtattcaacatttccgtgtcgcccttattcccttttttgcggcattttgccttcctgtttttgctcacccagaaacgctggtgaaagtaaaagatgctgaagatcagttgggtgcacgagtgggttacatcgaactggatctcaacagcggtaagatccttgagagttttcgccccgaagaacgttttccaatgatgagcacttttaaagttctgctatgtggcgcggtattatcccgtattgacgccgggcaagagcaactcggtcgccgcatacactattctcagaatgacttggttgagtactcaccagtcacagaaaagcatcttacggatggcatgacagtaagagaattatgcagtgctgccataaccatgagtgataacactgcggccaacttacttctgacaacgatcggaggaccgaaggagctaaccgcttttttgcacaacatgggggatcatgtaactcgccttgatcgttgggaaccggagctgaatgaagccataccaaacgacgagcgtgacaccacgatgcctgtagcaatggcaacaacgttgcgcaaactattaactggcgaactacttactctagcttcccggcaacaattaatagactggatggaggcggataaagttgcaggaccacttctgcgctcggcccttccggctggctggtttattgctgataaatctggagccggtgagcgtgggtctcgcggtatcattgcagcactggggccagatggtaagccctcccgtatcgtagttatctacacgacggggagtcaggcaactatggatgaacgaaatagacagatcgctgagataggtgcctcactgattaagcattggtaactgtcagaccaagtttactcatatatactttagattgatttaaaacttcatttttaatttaaaaggatctaggtgaagatcctttttgataatctcatgaccaaaatcccttaacgtgagttttcgttccactgagcgtcagaccccgtagaaaagatcaaaggatcttcttgagatcctttttttctgcgcgtaatctgctgcttgcaaacaaaaaaaccaccgctaccagcggtggtttgtttgccggatcaagagctaccaactctttttccgaaggtaactggcttcagcagagcgcagataccaaatactgttcttctagtgtagccgtagttaggccaccacttcaagaactctgtagcaccgcctacatacctcgctctgctaatcctgttaccagtggctgctgccagtggcgataagtcgtgtcttaccgggttggactcaagacgatagttaccggataaggcgcagcggtcgggctgaacggggggttcgtgcacacagcccagcttggagcgaacgacctacaccgaactgagatacctacagcgtgagctatgagaaagcgccacgcttcccgaagggagaaaggcggacaggtatccggtaagcggcagggtcggaacaggagagcgcacgagggagcttccagggggaaacgcctggtatctttatagtcctgtcgggtttcgccacctctgacttgagcgtcgatttttgtgatgctcgtcaggggggcggagcctatggaaaaacgccagcaacgcggcctttttacggttcctggccttttgctggccttttgctcacatgt

SEQ ID NO: 14 - DNA, 7518 bp, synthetic construct
  source 1..7518: mol_type = other DNA
ctgcgcgctcgctcgctcactgaggccgcccgggcaaagcccgggcgtcgggcgacctttggtcgcccggcctcagtgagcgagcgagcgcgcagagagggagtggccaactccatcactaggggttcctgcggcctctagaattcgctagctaggtcttgaaaggagtgggaattggctccggtgcccgtcagtgggcagagcgcacatcgcccacagtccccgagaagttggggggaggggtcggcaattgatccggtgcctagagaaggtggcgcggggtaaactgggaaagtgatgtcgtgtactggctccgcctttttcccgagggtgggggagaaccgtatataagtgcagtagtcgccgtgaacgttctttttcgcaacgggtttgccgccagaacacaggaccggtgccaccatgaaacggacagccgacggaagcgagttcgagtcaccaaagaagaagcggaaagtctctgaggtggagttttcccacgagtactggatgagacatgccctgaccctggccaagagggcacgggatgagagggaggtgcctgtgggagccgtgctggtgctgaacaatagagtgatcggcgagggctggaacagagccatcggcctgcacgacccaacagcccatgccgaaattatggccctgagacagggcggcctggtcatgcagaactacagactgattgacgccaccctgtacgtgacattcgagccttgcgtgatgtgcgccggcgccatgatccactctaggatcggccgcgtggtgtttggcgtgaggaactcaaaaagaggcgccgcaggctccctgatgaacgtgctgaactaccccggcatgaatcaccgcgtcgaaattaccgagggaatcctggcagatgaatgtgccgccctgctgtgcgatttctatcggatgcctagacaggtgttcaatgctcagaagaaggcccagagctccatcaactccggaggatctagcggaggctcctctggctctgagacacctggcacaagcgagagcgcaacacctgaaagcagcgggggcagcagcggggggtcaatgcaggagaaccagcagaagcaaaattacatcctgggcctggccatcggcatcaccagcgtgggctatggcctgatcgacagcaagaccagagaagtgattgacgccggcgtgcggctattcccagaggccgactctgaaaacaacagcaatagaagatctaagcggggcgcccggagactgaaaagacgaagaatccacagactgaacagagtgaaagacctcctggctgactaccagatgatcgacttaaacaacgtgcccaagtctaccgacccctacaccatccgggtgaagggactgcgggaacctctgaccaaggaagagtttgccatcgctctgctgcatatcgccaagagaagaggcctgcacaacatctccgtgagcatgggcgatgaggaacaggacaacgagctgtccaccaagcagcagctgcagaagaacgctcagcagctgcaggacaaatacgtgtgcgagctgcaactggaaagactgaccaacatcaacaaggtcagaggcgagaagaaccggttcaagaccgaagatttcgtgaaggaagtgaagcagctgtgcgagacccagcggcagtaccacaacatcgacgatcagttcatccagcagtacatcgacctggtgagcacccggagagaatacttcgagggccctggcaacggctctccatatggctgggatggagatctgctgaagtggtatgagaagctgatgggcagatgcacctacttccctgaggagctgagaagcgtgaagtacgcctacagcgccgatctgtttaacgccctgaacgatctgaacaacctggttgtgacccgcgacgacaaccctaagctggaatactacgagaaataccacattatcgagaacgtgttcaagcagaagaaaaatccaactctgaagcaaatcgccaaagagatcggcgtgcaggattacgacatcagaggatacagaattaccaagtccggtaagcctcagttcaccagcttcaaactctaccacgacctgaaaaacatctttgaacaggccaaatacctggaagatgtggagatgctggatgagatagctaaaatcctgacaatctaccaagacgagatcagcatcaagaaagccctggaccagctgcctgagctgctgaccgagagcgaaaaaagccagatcgctcagctgaccggctacaccggtacacatagactgtctctgaagtgcatccacatcgtgatcgacgagctgtgggagagccccgaaaaccagatggaaatcttcaccagactgaacctcaagccaaagaaggtggaaatgagcgagatcgacagcatccctaccacactggtggatgagttcatcctgagccctgtggtgaagcgggccttcatccagtccatcaaggtgatcaacgctgtgatcaacagattcggcctgcccgaggacatcattatcgagctggccagagagaagaacagcaaggacagaaggaagttcatcaacaagctgcagaaacagaatgaggccacccggaaaaaaatcgagcagctgctggccaagtacggcaataccaatgccaagtacatgatcgaaaagatcaagctgcatgacatgcaggagggcaagtgtctgtacagcctggaagctatccccctggaagacctgctgtctaatcctacacactacgaggtggaccacatcatccctagaagcgtgtccttcgacaacagcctgaacaacaaggttctggtgaagcaaagcgagaacagcaagaagggcaataggaccccttaccagtacctgagcagcaacgagtccaagatctcttacaaccagttcaagcagcacattctgaacctgtctaaggccaaagatagaatcagcaagaagaaacgagatatgctgctggaagaacgggacatcaacaaattcgaggtgcagaaggaattcatcaacagaaaccttgtggacacccggtacgccactcgggagctgagcaacctgctgaagacctacttcagcacacacgactacgccgtgaaagtgaagaccatcaacggcggcttcacaaaccacctgaggaaggtgtgggacttcaagaagcaccggaaccacggctacaagcaccacgccgaggatgccctggtcatcgccaacgccgactttctgttcaaaacccacaaggccctgagacggacagacaagatcctggaacagcctggactggaagtcaacgacaccaccgtgaaggtggacacagaggagaagtaccaggagttattcgagacaccgaaacaagtgaagaacatcaagcagtttagagatttcaagtattctcacagagttgacaagaagcccaaccggcagctgatcaatgataccctgtacagtaccagagagatcgatggcgaaacctacgtggtccaaacactgaaagacctgtacgccaaggacaatgaaaaggtgaaaaagctctttacagaacggcctcaaaagatactgatgtaccagcacgatcctaagacctttgagaaactgatgaccattctgaatcagtacgctgaggcaaagaatcctctggccgcttattacgaggataagggcgaatacgtgaccaagtacgccaagaagggcaacggccctgccatccacaagatcaaatacatcgacaagaaactgggcagctacctggacgtgagtaacaaatatcctgagacacagaacaagctggtgaaactgtctctgaagagctttagattcgacatctacaaatgtgaacagggctacaagatggtgtccattggctacctcgacgtactgaagaaggacaactactactacatccccaaagataagtacgaggccgagaagcagaaaaagaagatcaaggaaagcgacctcttcgtgggcagcttctactacaacgacctgatcatgtacgaggacgaactcttccgggtgatcggagtgaactccgatatcaacaacctggttgagctgaatatggtcgacatcacctacaaggatttctgcgaggtgaacaacgtgacaggcgagaagagaatcaagaaaaccatcggaaagagagtggtgctgatcgagaagtatacgaccgacatcctgggaaatctgtataaaacgcccctgcctaagaagccccagctcattttcaagagaggcgagctgtctggcggctcaaaaagaaccgccgacggcagcgaattcgagcccaagaagaagaggaaagtctaatagatctcgactgtgccttctagttgccagccatctgttgtttgcccctcccccgtgccttccttgaccctggaaggtgccactcccactgtcctttcctaataaaatgaggaaattgcatcgcattgtctgagtaggtgtcattctattctggggggtggggtggggcaggacagcaagggggaggattgggaagacaatagcaggcatgctggggatgcggtgggctctatggctcgagcggcccaagctggccgcaggaacccctagtgatggagttggccactccctctctgcgcgctcgctcgctcactgaggccgggcgaccaaaggtcgcccgacgcccgggctttgcccgggcggcctcagtgagcgagcgagcgcgcagccttaattaacctaattcactggccgtcgttttacaacgtcgtgactgggaaaaccctggcgttacccaacttaatcgccttgcagcacatccccctttcgccagctggcgtaatagcgaagaggcccgcaccgatcgcccttcccaacagttgcgcagcctgaatggcgaatgggacgcgccctgtagcggcgcattaagcgcggcgggtgtggtggttacgcgcagcgtgaccgctacacttgccagcgccctagcgcccgctcctttcgctttcttcccttcctttctcgccacgttcgccggctttccccgtcaagctctaaatcgggggctccctttagggttccgatttagtgctttacggcacctcgaccccaaaaaacttgattagggtgatggttcacgtagtgggccatcgccctgatagacggtttttcgccctttgacgttggagtccacgttctttaatagtggactcttgttccaaactggaacaacactcaaccctatctcggtctattcttttgatttataagggattttgccgatttcggcctattggttaaaaaatgagctgatttaacaaaaatttaacgcgaattttaacaaaatattaacgcttacaatttaggtggcacttttcggggaaatgtgcgcggaacccctatttgtttatttttctaaatacattcaaatatgtatccgctcatgagacaataaccctgataaatgcttcaataatattgaaaaaggaagagtatgagtattcaacatttccgtgtcgcccttattcccttttttgcggcattttgccttcctgtttttgctcacccagaaacgctggtgaaagtaaaagatgctgaagatcagttgggtgcacgagtgggttacatcgaactggatctcaacagcggtaagatccttgagagttttcgccccgaagaacgttttccaatgatgagcacttttaaagttctgctatgtggcgcggtattatcccgtattgacgccgggcaagagcaactcggtcgccgcatacactattctcagaatgacttggttgagtactcaccagtcacagaaaagcatcttacggatggcatgacagtaagagaattatgcagtgctgccataaccatgagtgataacactgcggccaacttacttctgacaacgatcggaggaccgaaggagctaaccgcttttttgcacaacatgggggatcatgtaactcgccttgatcgttgggaaccggagctgaatgaagccataccaaacgacgagcgtgacaccacgatgcctgtagcaatggcaacaacgttgcgcaaactattaactggcgaactacttactctagcttcccggcaacaattaatagactggatggaggcggataaagttgcaggaccacttctgcgctcggcccttccggctggctggtttattgctgataaatctggagccggtgagcgtgggtctcgcggtatcattgcagcactggggccagatggtaagccctcccgtatcgtagttatctacacgacggggagtcaggcaactatggatgaacgaaatagacagatcgctgagataggtgcctcactgattaagcattggtaactgtcagaccaagtttactcatatatactttagattgatttaaaacttcatttttaatttaaaaggatctaggtgaagatcctttttgataatctcatgaccaaaatcccttaacgtgagttttcgttccactgagcgtcagaccccgtagaaaagatcaaaggatcttcttgagatcctttttttctgcgcgtaatctgctgcttgcaaacaaaaaaaccaccgctaccagcggtggtttgtttgccggatcaagagctaccaactctttttccgaaggtaactggcttcagcagagcgcagataccaaatactgttcttctagtgtagccgtagttaggccaccacttcaagaactctgtagcaccgcctacatacctcgctctgctaatcctgttaccagtggctgctgccagtggcgataagtcgtgtcttaccgggttggactcaagacgatagttaccggataaggcgcagcggtcgggctgaacggggggttcgtgcacacagcccagcttggagcgaacgacctacaccgaactgagatacctacagcgtgagctatgagaaagcgccacgcttcccgaagggagaaaggcggacaggtatccggtaagcggcagggtcggaacaggagagcgcacgagggagcttccagggggaaacgcctggtatctttatagtcctgtcgggtttcgccacctctgacttgagcgtcgatttttgtgatgctcgtcaggggggcggagcctatggaaaaacgccagcaacgcggcctttttacggttcctggccttttgctggccttttgctcacatgttctttcctgcgttatcccctgattctgtggataaccgtattaccgcctttgagtgagctgataccgctcgccgcagccgaacgaccgagcgcagcgagtcagtgagcgaggaagcggaagagcgcccaatacgcaaaccgcctctccccgcgcgttggccgattcattaatgcagctggcacgacaggtttcccgactggaaagcgggcagtgagcgcaacgcaattaatgtgagttagctcactcattaggcaccccaggctttacactttatgcttccggctcgtatgttgtgtggaattgtgagcggataacaatttcacacaggaaacagctatgaccatgattacgccagatttaattaagg

SEQ ID NO: 15 - RNA, 4826 nt, synthetic construct
  source 1..4826: mol_type = other RNA
cctgcaggcagctgcgcgctcgctcgctcactgaggccgcccgggcgtcgggcgacctttggtcgcccggcctcagtgagcgagcgagcgcgcagagagggagtggccaactccatcactaggggttcctgcggccattcggtacaattcacgcgtaatagtaatcaattacggggtcattagttcatagcccatatatggagttccgcgttacataacttacggtaaatggcccgcctggctgaccgcccaacgacccccgcccattgacgtcaataatgacgtatgttcccatagtaacgccaatagggactttccattgacgtcaatgggtggagtatttacggtaaactgcccacttggcagtacatcaagtgtatcatatgccaagtacgccccctattgacgtcaatgacggtaaatggcccgcctggcattatgcccagtacatgaccttatgggactttcctacttggcagtacatctacgtattagtcatcgctattaccatggtgatgcggttttggcagtacatcaatgggcgtggatagcggtttgactcacggggatttccaagtctccaccccattgacgtcaatgggagtttgttttggcaccaaaatcaacgggactttccaaaatgtcgtaacaactccgccccattgacgcaaatgggcggtaggcgtgtacggtgggaggtctatataagcagagctcgtttagtgaaccaccggtgccaccatggtgagcaagggcgaggaggataacatggccatcatcaaggagttcatgcgcttcaaggtgcacatggagggctccgtgaacggccacgagttcgagatcgagggcgagggcgagggccgcccctacgagggcacccagaccgccaagctgaaggtgaccaagggtggccccctgcccttcgcctgggacatcctgtcccctcagttcatgtacggctccaaggcctacgtgaagcaccccgccgacatccccgactacttgaagctgtccttccccgagggcttcaagtgggagcgcgtgatgaacttcgaggacggcggcgtggtgaccgtgacccaggactcctccctgcaggacggcgagttcatctacaaggtgaagctgcgcggcaccaacttcccctccgacggccccgtaatgcagaagaagactatgggctgggaggcctcctccgagcggatgtaccccgaggacggcgccctgaagggcgagatcaagcagaggctgaagctgaaggacggcggccactacgacgctgaggtcaagaccacctacaaggccaagaagcccgtgcagctgcccggcgcctacaacgtcaacatcaagttggacatcacctcccacaacgaggactacaccatcgtggaacagtacgaacgcgccgagggccgccactccaccggcggcatggacgagctgtacaagtaaatcgaattcctgtgccttctagttgccagccatctgttgtttgcccctcccccgtgccttccttgaccctggaaggtgccactcccactgtcctttcctaataaaatgaggaaattgcatcgcattgtctgagtaggtgtcattctattctggggggtggggtggggcaggacagcaagggggaggattgggaagacaatagcaggcatgctggggatgcggtgggctctatggctcgagcggcccaagcttaaaaaaatctcgccaacaagttgacgagataaacacggcattttgccttgttttagtagattctgtaattttcattacagagtactaaaacggccacggcacctcccccgtgggtgtttcgtcctttccacaagatatataaagccaagaaatcgaaatactttcaagttacggtaagcatatgatagtccattttaaaacataattttaaaactgcaaactacccaagaaattattactttctacgtcacgtattttgtactaatatctttgtgtttacagtcaaattaattctaattatctctctaacagccttgtatcgtatatgcaaatatgaaggaatcatgggaaataggccctcttcctgcccgaccttgcggccgcaggaacccctagtgatggagttggccactccctctctgcgcgctcgctcgctcactgaggccgggcgaccaaaggtcgcccgacgcccgggctttgcccgggcggcctcagtgagcgagcgagcgcgcagctgcctgcaggggcgcctgatgcggtattttctccttacgcatctgtgcggtatttcacaccgcatacgtcaaagcaaccatagtacgcgccctgtagcggcgcattaagcgcggcgggtgtggtggttacgcgcagcgtgaccgctacacttgccagcgccttagcgcccgctcctttcgctttcttcccttcctttctcgccacgttcgccggctttccccgtcaagctctaaatcgggggctccctttagggttccgatttagtgctttacggcacctcgaccccaaaaaacttgatttgggtgatggttcacgtagtgggccatcgccctgatagacggtttttcgccctttgacgttggagtccacgttctttaatagtggactcttgttccaaactggaacaacactcaactctatctcgggctattcttttgatttataagggattttgccgatttcggtctattggttaaaaaatgagctgatttaacaaaaatttaacgcgaattttaacaaaatattaacgtttacaattttatggtgcactctcagtacaatctgctctgatgccgcatagttaagccagccccgacacccgccaacacccgctgacgcgccctgacgggcttgtctgctcccggcatccgcttacagacaagctgtgaccgtctccgggagctgcatgtgtcagaggttttcaccgtcatcaccgaaacgcgcgagacgaaagggcctcgtgatacgcctatttttataggttaatgtcatgataataatggtttcttagacgtcaggtggcacttttcggggaaatgtgcgcggaacccctatttgtttatttttctaaatacattcaaatatgtatccgctcatgagacaataaccctgataaatgcttcaataatattgaaaaaggaagagtatgagtattcaacatttccgtgtcgcccttattcccttttttgcggcattttgccttcctgtttttgctcacccagaaacgctggtgaaagtaaaagatgctgaagatcagttgggtgcacgagtgggttacatcgaactggatctcaacagcggtaagatccttgagagttttcgccccgaagaacgttttccaatgatgagcacttttaaagttctgctatgtggcgcggtattatcccgtattgacgccgggcaagagcaactcggtcgccgcatacactattctcagaatgacttggttgagtactcaccagtcacagaaaagcatcttacggatggcatgacagtaagagaattatgcagtgctgccataaccatgagtgataacactgcggccaacttacttctgacaacgatcggaggaccgaaggagctaaccgcttttttgcacaacatgggggatcatgtaactcgccttgatcgttgggaaccggagctgaatgaagccataccaaacgacgagcgtgacaccacgatgcctgtagcaatggcaacaacgttgcgcaaactattaactggcgaactacttactctagcttcccggcaacaattaatagactggatggaggcggataaagttgcaggaccacttctgcgctcggcccttccggctggctggtttattgctgataaatctggagccggtgagcgtgggtctcgcggtatcattgcagcactggggccagatggtaagccctcccgtatcgtagttatctacacgacggggagtcaggcaactatggatgaacgaaatagacagatcgctgagataggtgcctcactgattaagcattggtaactgtcagaccaagtttactcatatatactttagattgatttaaaacttcatttttaatttaaaaggatctaggtgaagatcctttttgataatctcatgaccaaaatcccttaacgtgagttttcgttccactgagcgtcagaccccgtagaaaagatcaaaggatcttcttgagatcctttttttctgcgcgtaatctgctgcttgcaaacaaaaaaaccaccgctaccagcggtggtttgtttgccggatcaagagctaccaactctttttccgaaggtaactggcttcagcagagcgcagataccaaatactgttcttctagtgtagccgtagttaggccaccacttcaagaactctgtagcaccgcctacatacctcgctctgctaatcctgttaccagtggctgctgccagtggcgataagtcgtgtcttaccgggttggactcaagacgatagttaccggataaggcgcagcggtcgggctgaacggggggttcgtgcacacagcccagcttggagcgaacgacctacaccgaactgagatacctacagcgtgagctatgagaaagcgccacgcttcccgaagggagaaaggcggacaggtatccggtaagcggcagggtcggaacaggagagcgcacgagggagcttccagggggaaacgcctggtatctttatagtcctgtcgggtttcgccacctctgacttgagcgtcgatttttgtgatgctcgtcaggggggcggagcctatggaaaaacgccagcaacgcggcctttttacggttcctggccttttgctggccttttgctcacatgt

SEQ ID NO: 16 - RNA, 4826 nt, synthetic construct
  source 1..4826: mol_type = other RNA
cctgcaggcagctgcgcgctcgctcgctcactgaggccgcccgggcgtcgggcgacctttggtcgcccggcctcagtgagcgagcgagcgcgcagagagggagtggccaactccatcactaggggttcctgcggccattcggtacaattcacgcgtaatagtaatcaattacggggtcattagttcatagcccatatatggagttccgcgttacataacttacggtaaatggcccgcctggctgaccgcccaacgacccccgcccattgacgtcaataatgacgtatgttcccatagtaacgccaatagggactttccattgacgtcaatgggtggagtatttacggtaaactgcccacttggcagtacatcaagtgtatcatatgccaagtacgccccctattgacgtcaatgacggtaaatggcccgcctggcattatgcccagtacatgaccttatgggactttcctacttggcagtacatctacgtattagtcatcgctattaccatggtgatgcggttttggcagtacatcaatgggcgtggatagcggtttgactcacggggatttccaagtctccaccccattgacgtcaatgggagtttgttttggcaccaaaatcaacgggactttccaaaatgtcgtaacaactccgccccattgacgcaaatgggcggtaggcgtgtacggtgggaggtctatataagcagagctcgtttagtgaaccaccggtgccaccatggtgagcaagggcgaggaggataacatggccatcatcaaggagttcatgcgcttcaaggtgcacatggagggctccgtgaacggccacgagttcgagatcgagggcgagggcgagggccgcccctacgagggcacccagaccgccaagctgaaggtgaccaagggtggccccctgcccttcgcctgggacatcctgtcccctcagttcatgtacggctccaaggcctacgtgaagcaccccgccgacatccccgactacttgaagctgtccttccccgagggcttcaagtgggagcgcgtgatgaacttcgaggacggcggcgtggtgaccgtgacccaggactcctccctgcaggacggcgagttcatctacaaggtgaagctgcgcggcaccaacttcccctccgacggccccgtaatgcagaagaagactatgggctgggaggcctcctccgagcggatgtaccccgaggacggcgccctgaagggcgagatcaagcagaggctgaagctgaaggacggcggccactacgacgctgaggtcaagaccacctacaaggccaagaagcccgtgcagctgcccggcgcctacaacgtcaacatcaagttggacatcacctcccacaacgaggactacaccatcgtggaacagtacgaacgcgccgagggccgccactccaccggcggcatggacgagctgtacaagtaaatcgaattcctgtgccttctagttgccagccatctgttgtttgcccctcccccgtgccttccttgaccctggaaggtgccactcccactgtcctttcctaataaaatgaggaaattgcatcgcattgtctgagtaggtgtcattctattctggggggtggggtggggcaggacagcaagggggaggattgggaagacaatagcaggcatgctggggatgcggtgggctctatggctcgagcggcccaagcttaaaaaaatctcgccaacaagttgacgagataaacacggcattttgccttgttttagtagattctgtaattttcattacagagtactaaaaccgccagggccacggcacctccggtgtttcgtcctttccacaagatatataaagccaagaaatcgaaatactttcaagttacggtaagcatatgatagtccattttaaaacataattttaaaactgcaaactacccaagaaattattactttctacgtcacgtattttgtactaatatctttgtgtttacagtcaaattaattctaattatctctctaacagccttgtatcgtatatgcaaatatgaaggaatcatgggaaataggccctcttcctgcccgaccttgcggccgcaggaacccctagtgatggagttggccactccctctctgcgcgctcgctcgctcactgaggccgggcgaccaaaggtcgcccgacgcccgggctttgcccgggcggcctcagtgagcgagcgagcgcgcagctgcctgcaggggcgcctgatgcggtattttctccttacgcatctgtgcggtatttcacaccgcatacgtcaaagcaaccatagtacgcgccctgtagcggcgcattaagcgcggcgggtgtggtggttacgcgcagcgtgaccgctacacttgccagcgccttagcgcccgctcctttcgctttcttcccttcctttctcgccacgttcgccggctttccccgtcaagctctaaatcgggggctccctttagggttccgatttagtgctttacggcacctcgaccccaaaaaacttgatttgggtgatggttcacgtagtgggccatcgccctgatagacggtttttcgccctttgacgttggagtccacgttctttaatagtggactcttgttccaaactggaacaacactcaactctatctcgggctattcttttgatttataagggattttgccgatttcggtctattggttaaaaaatgagctgatttaacaaaaatttaacgcgaattttaacaaaatattaacgtttacaattttatggtgcactctcagtacaatctgctctgatgccgcatagttaagccagccccgacacccgccaacacccgctgacgcgccctgacgggcttgtctgctcccggcatccgcttacagacaagctgtgaccgtctccgggagctgcatgtgtcagaggttttcaccgtcatcaccgaaacgcgcgagacgaaagggcctcgtgatacgcctatttttataggttaatgtcatgataataatggtttcttagacgtcaggtggcacttttcggggaaatgtgcgcggaacccctatttgtttatttttctaaatacattcaaatatgtatccgctcatgagacaataaccctgataaatgcttcaataatattgaaaaaggaagagtatgagtattcaacatttccgtgtcgcccttattcccttttttgcggcattttgccttcctgtttttgctcacccagaaacgctggtgaaagtaaaagatgctgaagatcagttgggtgcacgagtgggttacatcgaactggatctcaacagcggtaagatccttgagagttttcgccccgaagaacgttttccaatgatgagcacttttaaagttctgctatgtggcgcggtattatcccgtattgacgccgggcaagagcaactcggtcgccgcatacactattctcagaatgacttggttgagtactcaccagtcacagaaaagcatcttacggatggcatgacagtaagagaattatgcagtgctgccataaccatgagtgataacactgcggccaacttacttctgacaacgatcggaggaccgaaggagctaaccgcttttttgcacaacatgggggatcatgtaactcgccttgatcgttgggaaccggagctgaatgaagccataccaaacgacgagcgtgacaccacgatgcctgtagcaatggcaacaacgttgcgcaaactattaactggcgaactacttactctagcttcccggcaacaattaatagactggatggaggcggataaagttgcaggaccacttctgcgctcggcccttccggctggctggtttattgctgataaatctggagccggtgagcgtgggtctcgcggtatcattgcagcactggggccagatggtaagccctcccgtatcgtagttatctacacgacggggagtcaggcaactatggatgaacgaaatagacagatcgctgagataggtgcctcactgattaagcattggtaactgtcagaccaagtttactcatatatactttagattgatttaaaacttcatttttaatttaaaaggatctaggtgaagatcctttttgataatctcatgaccaaaatcccttaacgtgagttttcgttccactgagcgtcagaccccgtagaaaagatcaaaggatcttcttgagatcctttttttctgcgcgtaatctgctgcttgcaaacaaaaaaaccaccgctaccagcggtggtttgtttgccggatcaagagctaccaactctttttccgaaggtaactggcttcagcagagcgcagataccaaatactgttcttctagtgtagccgtagttaggccaccacttcaagaactctgtagcaccgcctacatacctcgctctgctaatcctgttaccagtggctgctgccagtggcgataagtcgtgtcttaccgggttggactcaagacgatagttaccggataaggcgcagcggtcgggctgaacggggggttcgtgcacacagcccagcttggagcgaacgacctacaccgaactgagatacctacagcgtgagctatgagaaagcgccacgcttcccgaagggagaaaggcggacaggtatccggtaagcggcagggtcggaacaggagagcgcacgagggagcttccagggggaaacgcctggtatctttatagtcctgtcgggtttcgccacctctgacttgagcgtcgatttttgtgatgctcgtcaggggggcggagcctatggaaaaacgccagcaacgcggcctttttacggttcctggccttttgctggccttttgctcacatgt

SEQ ID NO: 17 - DNA, 20 bp, synthetic construct
  source 1..20: mol_type = other DNA
ggaagcagattggagcagtg

SEQ ID NO: 18 - DNA, 33 bp, synthetic construct
  source 1..33: mol_type = other DNA
ataggatccgccttatatattccctgttaagct

SEQ ID NO: 19 - DNA, 34 bp, synthetic construct
  source 1..34: mol_type = other DNA
atagctagcctgctccaatctgcttcccgacagc

SEQ ID NO: 20 - DNA, 36 bp, synthetic construct
  source 1..36: mol_type = other DNA
ataggcgcgccggaagagcctctgccctgtcagaca

SEQ ID NO: 21 - DNA, 36 bp, synthetic construct
  source 1..36: mol_type = other DNA
atagcggccgccaatggccaaaatagaactggggca

SEQ ID NO: 22 - DNA, 20 bp, synthetic construct
  source 1..20: mol_type = other DNA
gccgcttccggggagaagtg

SEQ ID NO: 23 - DNA, 32 bp, synthetic construct
  source 1..32: mol_type = other DNA
ataggatccgctgcaagcaagtcggggtggga

SEQ ID NO: 24 - DNA, 32 bp, synthetic construct
  source 1..32: mol_type = other DNA
atagctagccttctccccggaagcggcaggac

SEQ ID NO: 25 - DNA, 33 bp, synthetic construct
  source 1..33: mol_type = other DNA
ataggcgcgccgaacgtcacgcagacagcactg

SEQ ID NO: 26 - DNA, 34 bp, synthetic construct
  source 1..34: mol_type = other DNA
atagcggccgcaagcagaagaatcgcttgaaccc

SEQ ID NO: 27 - DNA, 20 bp, synthetic construct
  source 1..20: mol_type = other DNA
agacaaagggaaagacagca

SEQ ID NO: 28 - DNA, 34 bp, synthetic construct
  source 1..34: mol_type = other DNA
ataggatccgttagttatatcatcatatccttcc

SEQ ID NO: 29 - DNA, 34 bp, synthetic construct
  source 1..34: mol_type = other DNA
atagctagcttttttgctttccttgctgtctttc

SEQ ID NO: 30 - DNA, 35 bp, synthetic construct
  source 1..35: mol_type = other DNA
ataggcgcgccagcttcatttttgatatattgttt

SEQ ID NO: 31 - DNA, 33 bp, synthetic construct
  source 1..33: mol_type = other DNA
atagcggccgcctatgaacaaaaagggatatga

SEQ ID NO: 32 - DNA, 20 bp, synthetic construct
  source 1..20: mol_type = other DNA
cccccacgggggaggtgccg

SEQ ID NO: 33 - DNA, 82 bp, synthetic construct
  source 1..82: mol_type = other DNA
cctcctggcagccacagagccacccgcgccagggccacggcgcctcccccgtgggggaccacggctccctggtgcgcatccc

SEQ ID NO: 34 - DNA, 82 bp, synthetic construct
  source 1..82: mol_type = other DNA
gggatgcgcaccagggagccgtggtcccccacgggggaggcgccgtggccctggcgcgggtggctctgtggctgccaggagg

SEQ ID NO: 35 - DNA, 20 bp, synthetic construct
  source 1..20: mol_type = other DNA
gccgtggtcccccacggggg

SEQ ID NO: 36 - DNA, 87 bp, synthetic construct
  source 1..87: mol_type = other DNA
ctcctggcagccacagagccacccgcgccagggccacggcgcctcccccgtgggggaccacggctccctggtgcgcatcccgccgcc

SEQ ID NO: 37 - DNA, 87 bp, synthetic construct
  source 1..87: mol_type = other DNA
ggcggcgggatgcgcaccagggagccgtggtcccccacgggggaggcgccgtggccctggcgcgggtggctctgtggctgccaggag

SEQ ID NO: 38 - DNA, 20 bp, synthetic construct
  source 1..20: mol_type = other DNA
ggccacggcacctcccccgt

SEQ ID NO: 39 - DNA, 88 bp, synthetic construct
  source 1..88: mol_type = other DNA
ctcctggcagccacagagccacccgcgccagggccacggcgcctcccccgtgggggaccacggctccctggtgcgcatcccgccgccg

SEQ ID NO: 40 - DNA, 88 bp, synthetic construct
  source 1..88: mol_type = other DNA
cggcggcgggatgcgcaccagggagccgtggtcccccacgggggaggcgccgtggccctggcgcgggtggctctgtggctgccaggag

SEQ ID NO: 41 - DNA, 20 bp, synthetic construct
  source 1..20: mol_type = other DNA
gggccacggcacctcccccg

SEQ ID NO: 42 - DNA, 87 bp, synthetic construct; identical to SEQ ID NO: 36
  source 1..87: mol_type = other DNA

SEQ ID NO: 43 - DNA, 87 bp, synthetic construct; identical to SEQ ID NO: 37
  source 1..87: mol_type = other DNA

SEQ ID NO: 44 - DNA, 20 bp, synthetic construct
  source 1..20: mol_type = other DNA
gccacggcacctcccccgtg

SEQ ID NO: 45 - DNA, 89 bp, synthetic construct
  source 1..89: mol_type = other DNA
ctcctggcagccacagagccacccgcgccagggccacggcgcctcccccgtgggggaccacggctccctggtgcgcatcccgccgccgc

SEQ ID NO: 46 - DNA, 89 bp, synthetic construct
  source 1..89: mol_type = other DNA
gcggcggcgggatgcgcaccagggagccgtggtcccccacgggggaggcgccgtggccctggcgcgggtggctctgtggctgccaggag

SEQ ID NO: 47 - DNA, 20 bp, synthetic construct
  source 1..20: mol_type = other DNA
cgggggaggtgccgtggccc

SEQ ID NO: 48 - DNA, 88 bp, synthetic construct
  source 1..88: mol_type = other DNA
cctccacctcctggcagccacagagccacccgcgccagggccacggcgcctcccccgtgggggaccacggctccctggtgcgcatccc

SEQ ID NO: 49 - DNA, 88 bp, synthetic construct
  source 1..88: mol_type = other DNA
gggatgcgcaccagggagccgtggtcccccacgggggaggcgccgtggccctggcgcgggtggctctgtggctgccaggaggtggagg

SEQ ID NO: 50 - DNA, 20 bp, synthetic construct
  source 1..20: mol_type = other DNA
agccacccgcgccagggcca

SEQ ID NO: 51 - DNA, 88 bp, synthetic construct; identical to SEQ ID NO: 48
  source 1..88: mol_type = other DNA

SEQ ID NO: 52 - DNA, 88 bp, synthetic construct; identical to SEQ ID NO: 49
  source 1..88: mol_type = other DNA

SEQ ID NO: 53 - DNA, 20 bp, synthetic construct
  source 1..20: mol_type = other DNA
ggagccgtggtcccccacgg

SEQ ID NO: 54 - DNA, 90 bp, synthetic construct
  source 1..90: mol_type = other DNA
ctcctggcagccacagagccacccgcgccagggccacggcgcctcccccgtgggggaccacggctccctggtgcgcatcccgccgccgcc

SEQ ID NO: 55 - DNA, 90 bp, synthetic construct
  source 1..90: mol_type = other DNA
ggcggcggcgggatgcgcaccagggagccgtggtcccccacgggggaggcgccgtggccctggcgcgggtggctctgtggctgccaggag

SEQ ID NO: 56 - DNA, 20 bp, synthetic construct
  source 1..20: mol_type = other DNA
ccacggcacctcccccgtgg

SEQ ID NO: 57 - DNA, 90 bp, synthetic construct; identical to SEQ ID NO: 54
  source 1..90: mol_type = other DNA

SEQ ID NO: 58 - DNA, 90 bp, synthetic construct; identical to SEQ ID NO: 55
  source 1..90: mol_type = other DNA

SEQ ID NO: 59 - DNA, 21 bp, synthetic construct
  source 1..21: mol_type = other DNA
tcccccacgggggaggtgccg

SEQ ID NO: 60 - DNA, 21 bp, synthetic construct
  source 1..21: mol_type = other DNA
agccgtggtcccccacggggg

SEQ ID NO: 61 - DNA, 21 bp, synthetic construct
  source 1..21: mol_type = other DNA
gggccacggcacctcccccgt

SEQ ID NO: 62 - DNA, 21 bp, synthetic construct
  source 1..21: mol_type = other DNA
agggccacggcacctcccccg

SEQ ID NO: 63 - DNA, 21 bp, synthetic construct
  source 1..21: mol_type = other DNA
ggccacggcacctcccccgtg

SEQ ID NO: 64 - DNA, 21 bp, synthetic construct
  source 1..21: mol_type = other DNA
acgggggaggtgccgtggccc

SEQ ID NO: 65 - DNA, 21 bp, synthetic construct
  source 1..21: mol_type = other DNA
gagccacccgcgccagggcca

SEQ ID NO: 66 - DNA, 21 bp, synthetic construct
  source 1..21: mol_type = other DNA
gggagccgtggtcccccacgg

SEQ ID NO: 67 - DNA, 21 bp, synthetic construct
  source 1..21: mol_type = other DNA
gccacggcacctcccccgtgg

SEQ ID NO: 68 - DNA, 21 bp, synthetic construct
  source 1..21: mol_type = other DNA
cagggagccgtggtcccccac

SEQ ID NO: 69 - DNA, 21 bp, synthetic construct
  source 1..21: mol_type = other DNA
gccacagagccacccgcgcca

SEQ ID NO: 70 - DNA, 21 bp, synthetic construct
  source 1..21: mol_type = other DNA
ccagggagccgtggtccccca

SEQ ID NO: 71 - DNA, 21 bp, synthetic construct
  source 1..21: mol_type = other DNA
ggaggtgccgtggccctggcg

SEQ ID NO: 72 - DNA, 21 bp, synthetic construct
  source 1..21: mol_type = other DNA
agccacagagccacccgcgcc

SEQ ID NO: 73 - DNA, 21 bp, synthetic construct
  source 1..21: mol_type = other DNA
gaggtgccgtggccctggcgc

SEQ ID NO: 74 - DNA, 21 bp, synthetic construct
  source 1..21: mol_type = other DNA
cacctcccccgtgggggacca

SEQ ID NO: 75 - DNA, 21 bp, synthetic construct
  source 1..21: mol_type = other DNA
gtgccgtggccctggcgcggg

SEQ ID NO: 76 - DNA, 21 bp, synthetic construct
  source 1..21: mol_type = other DNA
gggatgcgcaccagggagccg

SEQ ID NO: 77 - DNA, 21 bp, synthetic construct
  source 1..21: mol_type = other DNA
ccgtgggggaccacggctccc

SEQ ID NO: 78 - DNA, 21 bp, synthetic construct
  source 1..21: mol_type = other DNA
ggccacggcacctcccccgtg

SEQ ID NO: 79 - DNA, 21 bp, synthetic construct
  source 1..21: mol_type = other DNA
cagggccacggcacctccccc

SEQ ID NO: 80 - DNA, 21 bp, synthetic construct
  source 1..21: mol_type = other DNA
agggccacggcacctcccccg

SEQ ID NO: 81 - DNA, 21 bp, synthetic construct
  source 1..21: mol_type = other DNA
gggccacggcacctcccccgt

SEQ ID NO: 82 - DNA, 7089 bp, synthetic construct; identical to SEQ ID NO: 5
  source 1..7089: mol_type = other DNA

SEQ ID NO: 83 - DNA, 7168 bp, synthetic construct; identical to SEQ ID NO: 10
  source 1..7168: mol_type = other DNA

SEQ ID NO: 84 - DNA, 32767 bp, synthetic construct
  source 1..32767: mol_type = other DNA
taggtagaagtgagtggatcatggaaggcttcgtgtaataggtagaattttaactgatgactacaattgactcagcattattattataattataccctctgtaaattttgccagtcacgtagatttttgtattgggcaaagagaggtaaataggatctaacagatggaaatggaagaagagataatttacagtggcactgttaataaaagcatagagttttttagggaatggtgaataattcatatatgagttttactccttgtgccacctcatgtatttggtcatggcggcaagattcctcttaaatagaatcacaaggctggagtgctctaaataatgagcattatcttttgtggccttgaagtgatagggcttgctgttagttttgtgacattcgtaggagtgagctctataataatgtaagcccagagaggaccaggcatgtcaggccaacaggacaaaccaaaatcaatgccctgctctccttaccctcctcacagtgatatatccagacctccagggccagaaggcatggattaaaaaacaaaaaaaatgtgtgggggttaggggagaagagagaagcaatggaatgcaggcccttctctggagcagcatttttacctgcaaaaggcccacattgggagtaagggagacagttaatctgtgaattaaatcaacattgtaattgtcacataaaaattcagacctaaattctgcatagcttgatatgggtaatcaaaaattcctattcaaattctgtgtcacctagcacctctttgtaacataatatctatagtgtcttgacatttggtttaatactgctgttttaacatcttggtacacatgtgagagaataatacatatcaaccgcagacgttctgaaattgaagaaaattgtcatttccattccaggtatgcaggcacccttgccttattatcaaagacatgtacgattattgctgagagtacagatgcatgaatcagccttaagttgtatctgtaacagtgtatgtattcattttaagagttattggaaacaaatatgataacaatttaatatgtgcttaattttgtggaagatgtctgttaatgcttactacattatcttctagcgtatgtgcctggtttacaaacttccttccagcataacccatgtcctcatttttggtgacttcaatatccatggagataagtccatacaatgaactggcctttcagttggtttttaagtttttactgtgaattaattgtagactacgaagaagttgtgaaagcagtacagagagttcctgtatgcccatcacccgacctacagcaatacttacaagttaaataaatgtattgtcaaaaccaggaaatcgacattgatcccatctaattatctacactgtaaatcttatcagatttcaccaaataactacagcacaatcttaccaaattttaccagtgtttgcatgcactcatttttggagtgagatattcctctatgtttcattccataatattttgtcacaggtgtagattcataaacacaatcacattgaatatagaagtgtttctttaccacagaagaattcccttgggcttctcctactgtcacacacacagtgtgcttcttcccaaatccctctaatcactgatctattcttcatgtctgtaatttcatcattttgaaagggttacataaatggaatcatacagtatctaatcttttgactttggctttttttattcagcataatgtcctcaaaatccacccaacattttccagctatcaatagcttattgctgactttcttatactaccgagtagtgttcaattgtatagatgtactatgctttgtttcactattcacaagtggaaagacattgctgttttttctaacgtggcatttataaataaagcagctatacacgtatgtgtacagacttttttattttattttaagttctgggatacatgtgcataatctgcaggtttctaacataggtatacatctgccatggtggtttgctgcacctatcaacccatcatctaggttttaagccctgcatgcattaggtatatgtcataatgatctccctccccttgatccccaccacccaacaggatgtgttctgtaatgttcccctccctgtgttcaacagttctcatttttcaactcccaattatgagtgagaacgtgcgttgtttggttttctgttcctgtgttaatttgctgaaaataatggcctccagcttcatccgtgtccctgctaaggacgtgaactcattctttcttatgactgcatagtattccatagtgtatatgtgctacattttcttcatccagtctatcattgatgggcatttgggttggttccaagtctttgctattgtaaatagtgctgcaataaacatacatgtgcatgtgtctttatactagaatgatttataatcctgtggatatatatccagtaatgggattgctgggccaaatggtatttctggttctacctccttgagaaatcttctcactgtcttgcacaatggttgaactaatttacactcctacctacagtataaaagctttcctgtttctccacagcctcatcagcatctgttctttcctaactttttttttttttttttttggcgaattttttgtacttttagtagagacagggtttcaccatgttagccaggatggtctcgatctcctgacctcatgatccgcccacctcggcctcccaaagtgctaggattataggcatgagccaccacgcccggcctcctaactttttaataattaccattctgactgttgtgagatggtatctcattgtggtttttatttgcatttctctaatgaccagtgatgatgagctttttttcatatgtttgttggccacataagtgtcttcttttaagaggtgtctgttcacattctttgcccactttttgatgggcaaagaggaactttgtcctcttttaaatttatttaactccctttaagatactggatattaggcctttgtgagatggtgagattgcaaaaattttctaccattctgtaggttgcctgttccctctgatgatagtttcttttgctgtgcagaagctctttaggttacttagatcacatttgtcaattttggctttttttgcaattgctcttggtgttttcatcatgaagtcattgcctatgcctatgtcctgaatgcgattgcctggattttcttctggggtttttttatggttttgggttttacatttaagtgtttaatccatcttgagtttatttttgtacacaatgtaaggaaggggtccaatttttgttttctgcccatggctagccagttatcccagcaccacttattaaatagggaatcctttcaccattgcttatttttgtcaggtttgttgaagatcagatggttgtagatgtgtggtgttatttctgaggtctctgttctgtttcactggtctatgtatctgttttggtagcagtaccatgctgttttggttactgtatccttgtagtatagtttgaagtcaagtagcgtgatgcctccagctttgttccttttccttaggattgtcttggtaatatgggctctttttggttttaaatgaaatgtaaagtagttttttctaattctgtgtagaaagtcaagggtagcttgatgggaatagcactgaaactataaattactttgggtagtatggccattttcatgatactgattcttcatatccatgagaatggaatttttttccatttgtttgtatcctcttttatttccttgaatagtggtttgcaattttccttgaagaggtcattcacatcccttgtatgctgtattcctaggtcttttattctctttgcaacaattgtgagagggagttcactcatgatttggcgctttgcttttctattatcggtgtataggaatgcttgtaatttttgtacattgattttgtatcctgagattttgctgaatttccttatcagctcaaggagttctggggctgagatgatggagttttccaaatatacaatcatgtcatctgcaaagagagacagtttgacttcctgtcttcctatttgaatacccttcatttatctctcttacctgatttccctggccagaactttcaatactgtgttgaataggagtggtgagagggcatttctgtcttgtttccagtttttaaaggaagtgtttccagtttttgcccagtcagtatcatattggctatgggtttatcataattaactctcattattttgagatatgttccatcaatacctagttgattgagagtttttaacatgaagggatgttgaattttatcaaaggctttttctgcatctattgagataatcacatggtgtttgttattggttctgtttatgtgatggattacacttattgatttgcatatgttgaaccagccttgcatcccagggatgaagctgacttgatcgtggtggataagctttttgatgtgctgctggattcggtttgccattattttattgaggatttttacatcgatgttcctcagggttattggcctgaaattttctttttttgttgtgtctctgccaggttttggtatcaggatgaagctggcctcatgagttagggaggagatcttttttttctgttgtttggaatcctttcagaaggagtggtaacagctcctctttgtgcctctggtagaatttgtctgtcaatccatctggtcttgaactttttttcattgataggctattaattattgcttcaatttcagaacttgttattggtctattcagggatttggcttcttcctggtttcatcggaggagggtgtatgtgtccaggaatttatccatttcttctagattttctagttgatttgcttagagatgtttatagtattctctgatggtagttgtatttctgtgggatcagtggtgatatcccctctatcattgtttattgtgtctatttgattcttctctcttcttctttactagtctagctagtggtctatctatcttgttaatgttttgaaaaagccagcttctggattcattgatttttttgaagggtttttcgtgtttctagctccttcagttctgctctgatcttagttatttcttgtcttctgctagcttttgaagttgcttgctcttgcttctctagttttttaaattgtgatgttagggtgttgatttcaagccttttcagctttctgatatgggcatttggtatataaatttctctcttaacactgctttagctgtgtcccatagattctggtacattgtctctttgttctcattgatttcaaagaacgtctttatttctgccttaattttgttatttacccagtagtcattcaggagcaggttgttcaatttccatgtagttgtgtggttttgagtgagtttcttaatcctgagttctaatttgattgtactgcagtcagagagattgtttgttattgtttccaatcttttgtatttgctgaggagtattttacttccagttatgtggtcgatttttagaataagtgctatgtggcactgagaagactgtatattctgttgatttggggtggagagttctgtcgatgtctattaggttcacttggtccagagctgagttcaagtcctgaatatccttgttttctgtctctttgatctaatattgacagtggggtgtaaaagtctcctgctattattatgtgggagtctaagtctctttgtaggtctgtaagaacttgttttatgaatgtgggtgctcctgtattgggtgcatatatatttaggatagttagttcttcttgttgccttgatccctttaccattatgtaatgccctcctttgtcttttttgatcttcattagttaaagactgttttatcagagactaagattgcaaccgctgcttttttttgctttccatttgcttggcaaatatttttccatccctttatcttgagcctatgtgtgtctttgcacgtgagatgagtctcctgaatatagcacacctatgggtcttcactgtttatccaatttgcctgatgctagctgggtattttgcacattagttaatgcagtttcttcatagtgtcattggtctttatattttagcgtgtttttgcagtggctggtaccagtttttcctttctatatttagtgcttccttcaggagctcctgtaaggcaggcctggtgatgacaaaatcccttacaatttgcctgtcgggaaaggattttttttcttctttccttatggagcttagattggctggatatgaaactcacggttgaaaattcttttctttaagaatgttgaatattggcccccactctcttctgccttgtggagttcctgcaaagagttccgctgttattctgatgggcttcccttttaggtagcctgacctttctctcttgctgcctttaacattttttcctttatttcaactttggagaatctaacaattatgtgtcttggggttgctcttcccgaggaatatcttagtgttgttctctctgtttcctaaatttgaatgctggcctgtcttgctaggatggtgaagttctcctggataatatcctgaagtgtatttttgaacttggttccattctccccatcaccttcagttgcaccaatcaattgtaggtttgtctattcacatagtcccatatttcttggaggttttgttcattcattttcattcttttttctctaatctagtcttcatgccttatttcagtaagttgatctccaacctctgatattctttcttctgcttgattgattcagctattgatacttgtgtatacttcacaaagtccttgtgctgtgtttttcagctccatcaggtcacttatgttcctctctgtactggttattctagttagcagttcctgtaaccttttatcaaggttcttagctttcttgcattgggttagaatatgctcctttagctcagaggagtttgttattacccaccttttgaagcctacttctgtcaattcatcagtctcattctccatgcagttttgcgctgttgcttgagaggagttgcgatagtttggaggagaagaggctttctggtttttggaattttcagtatttttgcactgctttcctcatatttctggatttatctacatttgatcttttaggccgataacctttgggtggggtttttgtgtgggggtctttttagttgatgttgatgttattgctttctgtttgctagtttgtcttctaacagtcaggcctctcttctgcaggtcggctgcagtttgctggaggtccaatccagaccctgttcacctgggtatcaccagtggaggctgcagaacagcaaaagatggctgcctgatcctttctctggaagcttcattccagaggggcactggcctgatgccaactagagctctcctgtatgaggtgtctgtccacccctgttaggaggtctctcccagttgggaggcacgggggtcagggacccacttgaggaggcaatctgtcccttagcagagctggtgcactgtgctgggagaaccccccttgtcaggatcagctgctatcttcagaggcagcaggcaggaaagattaaatctgctgcggttgcgcccacagcctccccttcccccacgtgctccatcccagggagataggaattttatctgtaaacccctgactgcgcctgctgtctgtccttcagagatgtcctgcccagtgaggaggaatctagagaagtagtctggccatagctgcttagccgcgctgtggtgaattccgcccagtccaaacctcccagccttcttagcactgtcaggggaaaaccgcctactaaagcctcaggaatggcggatacccctctctccacaaagctcaatcgccccaggtcgacttcagactgctgcgccggcagtgagaatttcaagccagtggttctttgcttgctgggctctgtgggagtgggacccattgaggcaggggaccacttgtctccctggcttcagccccctttccaggggagtgaacggatctgtctcactggagttccaggcaccactggggtatgaaaaaaactcctgcatctaggtcggtctctgcccaaacagctgcccaatattgtgcttgaaacccagagccctggtggtgtaggcacacgagggaattcctgatctgcggatcgcaaaaaccatttcaaaagcgtagtactgggctggtagcagggttcctcacagcttcccttgattgggggacaggtgtcccctggctccttgtacttcgcagatgaagcgatgccccaccctgcttctccttgctctccgtgggttgtacacactgcctaaccagtctcaatgagatgaactgggtacctgagttggaaatgcagaaatcaccagtcttctgcgttggtcccgctgggagctgcagaccagaactgtttttatttggccatcttggcccccctcctgtacagatttttaagtgaacacagtttcccagtttctaggatacattttccaggttctaggatacgctggattgctggattatatgaaaatgcaagaagatttcccagagtagctctactattttactttctcattggcagtgtatgagacctccaattccttcaaatctcagccaatatttgaaactatcagtattttatattttagccatattgagagggtagagtggtatctcgtgacttttatttgttgtcctaaacattagtgatgttgagcatctttttacgtgtttatttgtcatgcatatatgtgtttgctgaagcatctgttcgtcttttaccctgattgaatccagctctccactaactccatgcctgttcccatagaactgagggtggctgcagcacaacacacaaccatgcccagcggtttcactgttcatttatgaccttgaacctgaaatgttcacttatatctcctgaacagtcatgtgacatttccataattgcctctcatctccaaaggaaaaccttcagccatcgtctgtctcctgaaaccacctactctttatttatttttttaatcactgtcaggtgatgctcttctgagaattactcaatctccccagagcgaacctacctccccatgtgcctctgagcacacctctctgcattttctctcatgccaggaaatgggctctgcaaattcctgtttgaaaccaccctttccatttgtgcagtttccccttttgcctccccagaaacattttatagcattattgcctctcccttctacatcttcaatgtttccttctctaatggatccttccattgcaactgaaacaccccatcctatttgtggcataaaacaccatctaagcaaccattcgtctctatccacagcctgatttatcttctttattttagaaaaaaatatcttccaaagagatttctgtactcattatcttcatttcctcacccttcctcatatcttctcatatctctaactccctctcttagctagatcattaaatttatgttttttgtttgaaaatttatttgtgacatggtaataaagtcaaagctttcaaaaataatctttaaatacactcactgaaaactgtcattcccattttaggtcctcaggcatccttgccttgttaacaaagacatatcctattatacttactaataagtgtatattaattcacaaatatttaataataaaacaatatatatatttttcatacaatatatacattggtctgcattctttttaaaaaatctaacaaattctgcagggccttttatatcaggtttgttgctctttctgggtagctacagagtattctattgcatagatagacagtaatttatacagtattgatggccattttggctgttaccagtttttgactgtaaataacactgcatttattaactcagaacatagatcttttgaacatgcacaaatatatctctaagataaattcttagatgaggaattacagagagaaaaggatggtgctttatacatgcttccatatgttgaaaacagccttcactggaagttgtatccatctgcatccccagcagaaatgagtgagggtacctgatcccactccatccccacactgtatgctataaaacttaatggttttttagattttggtaaataaaatataactctgtaatttcaattggcatgtctttcattatgagttgaatttctcctctttccatatgtttaggagccatttttattttttagaaattgtgaatcatgacttaaagttattttcttattacctttttcaattttgaattattaacatcatttagaaaaatttgtatcaatagagaaaatttatactttggctataacatacattaccaaacatctcccagtttatttatttaattttattaatttactaatttatttcttgagatggagtctcgttctgtcacccaagctggagtgcagaggcacagtcttggctcactgcaaatttcgtctactaggttcaatccattctcttgctcagcctctcgagcagctgggattacaagcgtgtcccaccacaacgaattaatttttgtatttttagtagagaccaggtttcaccatggtggccaggctggtctcatactcctgacctcaggtgatctgcctgccttggcctcccaaagtgctgggattacaggggtgaaccaccatgcctggccacagtttatttatatcttgattatgatggttaatgttatgctaaaaaaaataacttttttttttttttgagacaaagtctggctctatcagccaggggagtgcaatggtgtgctgtcagctcactgtaacctccacggcctgggctcaagccatcctgccaccacaacgtcccaggtagctgggactacagacatgcaccaccacaccaggctagtttttgtattttttgtagaaacgggttttcactatgttgcccagaatggtctcaaacttgtaagctcaagcaatccacccacgcagcctcccaaagtgctgggattacaggaatgggccatcacagctagcctttttgtctttataaatattttctttaatatcttctgaattgtatcctataattgaaagtctttttccactttgatttaaaaactatttggctatggcttctccaggtaattgtattttcattataaaattttaagtagtgtatttgcatgtatcctcaaatcatatgtaaagtatgtttccacctttacttatttcacacagaaactcagttgtcccaatcccattcattcaattgtgcctgttttacacactactttgatatacaacctttatcataataggcatacattgaagatattagaagtccacttccactactgcaataaagcaaatattacaataaagtgaatcacatgaatttttggtgtcccggtacatgtaaaatttatgcttacactatactgtactctattgagtctcaatggcattatgtctaaagcaatgtgcatgcattacttaaaaaaatactttttcactaagaaatggtaaccatcatcagaaacttcatcaagccaaacgttttgctgctggagggtcttgcttgatattgatggctgctgaagtggctgctgaaggtaagacaggctgtgccaatatcttaaaacaagacaacagtgaagtctgccacatcaactgactcatccttttatgaaagattttaatgtagcatgcaatgctatttgcatagcattttatacacaatagaacttcttttaaaatgggagtccattctctcaaactgcgccactgtttttatcaaggaagttgaacaagatggaatgtgatgggagaggcttatctctattggatatgggacagaggccaagaatcatctcaggtagggtttgtgtctccaatacctctggccactgatttgtccatagtcctcatacaggaaataacaagtctgtccagcatcttcataagcctggattgctcaccagctttgactccagctcctgtatgcatctcctgaattaagcaacacagaagggttctctgaagtcactgaatcccagaaaggccctccacctttagcacaagggacgtcttcaccactggacaaaggagaaaaagataagggtaagtaccaagatttgtcttcttccatagtcagtcatggtttttgctataagatcgtttctgtttccacctaggtgctacaggcaggggatcatgagcttgtttcaggaaaagacaggggacatgaagtttccttctggaaactgagtgctgccaacccagactgtgtgagtttcaactggagtccccccatttgatttatctgtccatatcacctcccttattccaatcactgaacctgtcctcttagagaaaatgctgcctctcacattcatttaaggagctagaggacatgcaagcattgcttcacagagttgaactgctgtagaagcaggttttgttgttttacttacttttctaaattattattccttgcctgtctggaaaggttcaaggaagaaataggtggtccaaactgaaatgactgaggagtgtttcgtgagggaagtatttacaaagatgtgcaaggttaagggaaagagacaatgcatgggtcagcaccctaagcaacaatacataggggaggactaagtcctcccctaggctgaaagggagaaggaaggagcagttaccattgtcgccatagccatagctgtagccataggggtggtagagctccagcaggcaggtggagaagccttgcacggccaacacacagccacacaggctgatatgctttggatctgtgtccccaaccaaatctcaggttgattgtaattcccagtgttggagggagggcctggtgggaggtgattaaatagtggggatggtttctcataaatggcttaacactatcccccttcggtattgccttagtgatagtgagttctcatgcaatctagttgtttaaaagtgtgtagcacctcttccctgtctctcttgctcctgctctcaccatgtgagatgacttgctccccctttgcctttcaccatgattggaagcttcctgaggccttcttagaagcagaagctgctatgcttcttgcatagcccgcagagccataagccaattaaacctgttttcttcataaatttcccagtctcaggtatttctttgtagcaattcaagaatgaactaatacacaggcagagagccaggaggtggaaatcccaagtggctctcctgctgtcttccagtctcatccaggtgtctcccagtgtctcaattccaccagaaactggaattaaaaagaatcccactgatgtggtgcacagaagccactctcttggggtgtcaaacaggatagagaagaatggaaagcaaatcatcatagcaaatgagactatccctctctccttcttatatcctcctaattcctgggacagtctctgtctacaggtgattgattcctgtctcatttcagctctttcagactactttaatgttcggcatgtctttctctactgtcacttctatgcagaaatgtttgcattcatccaaaatgcatagaaaataaaatgtaattttaaaaagagaacatatttcttttgtttagaatacaagtttgacccctctcataaagacacaaagtagaaatatcttaaataagaaagtacagtggtgcctctgggtcactaggttctgaatctgcagattcaacaacccacaggtggaaactgttccaaaaataagggtatggcggaggtgtgcatgtactgaacaggtacaaacttgtttttccttgtcattacttctgaaataacacagtaaaacaagaacttacatggcatttgcattttgtcagttattctaagtaacttagaagtgatttaatgtatctgggagaaagtgcataggttttgtacaactatcacatcattttatataaggaaattgagcatctgcagattttggtgtgtgctggggtagcagcacacacatctgccatatgcgaaagcccctgtgaatatccagaaatgacactctttgagatcagtgcgggaagctccaaggcatcgtacatcagaattccaaaaactgctactctcgagtccctagagagttgccctcatacttgtgatcctatatggttcccagccacaccagcatttcagcatgatggaaaaaaaataaggaaaggagatgcgttgctcctgctattggtcctgtgagccaggacttgcttacatcacttttgtgcatctttcactgaacagcacctggtcataaaatggcacccagcatcaaggaaaactggaatgtaggtccttgtgccgcttttaaactctcagaatttttatgtgaccaaacaggaaaatgaacactggggcaacctagcagtctcttctgcctctgtctctgattctgtactcacatcaagatttttcaggaactcctctgaaataatgaatcatgcggcagagaaccatacagaagtctcatgcagggctccagggaccaggggctggcattgggcctgctcttcgtgttgtgaactcatgaaaacactttaattctctaggcctcggcttcatcttatgttatattaagataataccatagatgatctttaaagaacacatgctaaatgttggtgataccacagtggaaaagacaggcatgactagccgttatgaagcttcaggtttcatgaggaagacaaacacaccattaccctaaatatagagggacaatgtgtttagtgccctgcctgtggataacagaggttctccttttcctcccatttcctttttgggccaagcaaggctgtggcagcttgtctctctaagagagctcatgatggatgcactcactcctgatgctcctctgtaatcccagaggagggtgagtcttctttccacctggaggcctcctgtccctgtgcattctcgggattccagagcaaaggtggcctctgataggcaaaaaggaactcctgaatttgttactaaatggctttcactcttctctattttgttccctatttgacctgcttctctttctctatctgaagttggtttaggttagtttttttttttttcaacccacaattttgccgccaacttggatttaatcttgagaatccctcctctcctttacccgctctaacatgtataatcgacacagagtcgtgctgggtgtaaagggctgctcaaagactggatcatgagtcagccctgctgggctcaaattcatactatataagtcccagaatgaataattcactctttttgtgttccaatgcattatctgacatatgggaataatactcattcttaactcctaggctcttcagataattaaaacagacaatacctaataaactctccatcagctgctcttattctcccagattagacccagtcctcattctccagttgaaatctacatgaatatctctctttatactccaagccctacatatctcctatttcgcctcatggactcctcacatacaaatgtttgcatcaacaaagaaacgaaccaaagatctcctgaaagaaagaatgaaataggtttatattgtgtatactcagcagaatactcagtagtgccccacagatattcccacacttcaattacctgctgcagtggcactcaggctcaccctcacttactctttcctctgttctattgctgagcaattcagctcagacccacaccctacccaaaacactgtgtacaaaatgcttctaggggttcggcaaagccacactgagtccttattttaaaggcacatcagtggtcaatttcaggttttgggcactcatcaatcattcttctcaacacagatagagctgtccacaaatagaattctgatgaatgaaattttctgtacctaattaaacatgggtgttctaataacttacattgtgctttcatttttgttttccatttcacccaaatctaccattaccattaggcttctcatgcatgcattcattcattgaatgaatgtatatgaaaagcacagtgtgctgcttatggaataggcactaggagtataaaatgtaaaatgtggtcctgtctgcaatgactgacatgctgagttatttctcacccaccaggcccagccattttcacacttatcctagcgaaggtcacattttcctctggttcataatgcatggtctcctttcctgtccatggatgatcagtcctggtcatgagggtgtcacaaccacctctttgcatacctgaattcctccccctgagagaaaatttcaggcccaggatagagtaatcatcgggtccacagccctggctagatgagtgggggtgttttgatcctaatgttattcccatgttagcacagaacttgtgtggcagtagagagaggtcaggcttcagagtcagcaagaactggatttcaaactggatttgaggacccccaccttttgataggtgacttattctctgtgagtctctgatctgccctctttaaatgaggaagtaaatcccacatggcagggtggtggggagaatcagagatcatacagctggtgatcacaactggtttctgtttccagggtcaccagactagggtttctgagcatggatccaaccatctcaaccttggacacagaactgacaccaatcaacggaactgaggagactctttgctacaagcagaccttgagcctcacggtgctgacgtgcatcgtttcccttgtcgggctgacaggaaacgcagttgtgctctggctcctgggctgccgcatgcgcaggaacgccttctccatctacatcctcaacttggccgcagcagacttcctcttcctcagcggccgccttatatattccctgttaagcttcatcagtatcccccataccatctctaaaatcctctatcctgtgatgatgttttcctactttgcaggcctgagctttctgagtgccgtgagcaccgagcgctgcctgtccgtcctgtggcccatctggtaccgctgccaccgccccacacacctgtcagcggtggtgtgtgtcctgctctgggccctgtccctgctgcggagcatcctggagtggatgttatgtggcttcctgttcagtggtgctgattctgcttggtgtcaaacatcagatttcatcacagtcgcgtggctgatttttttatgtgtggttctctgtgggtccagcctggtcctgctgatcaggattctctgtggatcccggaagataccgctgaccaggctgtacgtgaccatcctgctcacagtactggtcttcctcctctgtggcctgccctttggcattcagtttttcctatttttatggatccacgtggacagggaagtcttattttgtcatgttcatctagtttctattttcctgtccgctcttaacagcagtgccaaccccatcatttacttcttcgtgggctcctttaggcagcgtcaaaataggcagaacctgaagctggttctccagagggctctgcaggacgcgtctgaggtggatgaaggtggagggcagcttcctgaggaaatcctggagctgtcgggaagcagattggagcagtgaggaagagcctctgccctgtcagacaggactttgagagcaacactgccctgccacccttgacaattatatgcgtttttcttagccttctgcctcagaaatgtctcagtggttcctcaaggtcttcaaatagatgtttatctaacctgacagttgcggttttcacccatggaaagcattagtctgacagtacaatgtttagattctccttgatattaccaacacattttccctgttatctcacactgaatctttcctacagaacactttttctgcaattttctttgtaataaaaggagttcctgtacaaaaccctaaaacactctttatacttctttcctacctgatagcatcaaaaaggaagattccttattaatctctcagactatgttcccctgaaaatcatgttcccttctatgactggaggcattactgcagttagaagctcgattcttaataagtgagttctgctatctctacattccattgaattctcagatacagagcaaaataatgtccttagagacagactctctcttcataaaaacactctcaccaattggttttataaaaagtcttcccctgtcatttgttcacagcatggtgatatgttggccttggtttctagtaaagacaactgtggccccttccccttgagaacttttaagtgcttatttagctcttcctggactaatggaccagtgaggagcccataaatgtgccccagttctattttggccattggaaacctcaatattggtttcaaagtggaaattatcttgaaaaccatttattatttgcttacagactctttcagttgtagaagaattcttcatacttccaggttttgtacaaattgttctggctgtaactttcagttagttaaatggccattaacatgagaggcaagactgataacatctgacttttccatgctaatgtcaattatggtatcttgataataacttacagttggtatagaattctgatacatgcttgacatagatgaacctggaaacattctgctaaggaaaataagccagataccaaagaacagtaagttcaaattctaccaggtatccaaactaggaaattcgtgaacacagaaattaaattaggaggatcctggtgctagatgatggggagaatatgtagccattattaaatgagcacagaatttctgtgtggaataatgaaaaattcttaaaagggacagtagtaacagttacaacttattgtgaatgtacttactgacactgattgtacacttaaaatggttaaagttgtaaaatgtatgttatgtaaattttaccacaattaaaaacagttaattatagaaatgggatcagtacaaaattcaggactattccccaccagtggttataatttccacagataactcaagcaggcagaagagattatcaagagaaaatgtgacatcacagcaattaaccctcactgaggggagctgacaactgcaatttgagtatgcaggagactgtacaaagtagctgtgaaaccaataaagaggtatatagttttcaatttgtccaaccaaatttattggtggcacttataacactgttcacaatgttgaactcaggtcccctcagtcctccagatccattgctcttccaggcccagccctctgctgatgctgaatcccatctgtccaccctcaatttccaaatgctgtagtaggacatggctgttggcgagggtttcctacaggtcggaggaagcaggaagccagtgtttgcagccaatgctccaggcaaggagctttgatgtgatgtcttcagttcaggccgagggttattgggagagtccactctgggagtctgtgatatcaattgtacagttttgactaaagatgatgtctatcatgaggaattctgtagaaaattttcacctggcaattgaatcaaataaagtttgtcctcacctgggaaactgcttatcttgatgtcagtgacatttcttttcttttgacggaagaaaacttcaacttcgagaaggcttagattatatcgctgaagcccattctgaactcacctgacctcacacattgctctactacagcacttataacagttcattgaattatttgtcctcacctctttctcttctaccacaccctcagttctttaagagcagagaacatgtctttgaatttctagtgcaacagactaggtgtggaatttagaagaagctcagaactatttttctcaagcagctcacacctgggagtcacagggttgtccagcatcttgcaaaggctagctcagtcaccaagtctcactggaactcctataagcacctcccacttaacagagtgtcctctgcagttggtcattctgagaacagctgttgccttttatcgcaggtctgctcactgcctctgggaagaagaatggaggggatgtgggagtctgctcatgagctgccttctttccaaggtcaatgatatcatttcctctcaggtacatgtcaaggaagagcatgcaggacatccaggagtgttctccagaaagtaagaaatgatatgaaaatctctcacggcaccttttgggagctgccattcatgactattttttaggcatgaattcaacaaacattcaaacctaattcatcaggcactgtgataattctacataaaagcaaacgcctttcaaataagcctctcactaatatattctatgtctataaccaaacctttcaccttcatgaagaaaatatattgattgattccgagcaaatgctgagccttcatggcaattcactgatgctctagtagtacacctgggctcaaggacactgagtcatcagcctcagaagaaccagttggatctgtttctcgtcctgcttttgccaattaggcttgtcaatataatttcctaatttatcaaaatacagcacaagttaatgaaacaagagtatgaaagaagaattgcggtttccataaagctaatgtgaatgcttaaatggaaaataaaagcaggttccaaaattgttagtttagtagctgtgagtcttccaactctacaagattaaacaaaaatgaaaaatattgaacaacatttttagacagaatgctatgcatctgatgctaaattctactcttaaactaatccaaactgcaaatcacagagaatgattgatagctatgctttcagcaagacagagtagaattctatttgctgaaacctacacaaagaaatgttctttagtctatttctattatactgaacaaattacaggtaaaaatgaaatattcatgttacaaatgtatcattttttataaatactgattaacagacatttccaattaacctatccacttccattcctgaatatattatgactgggcttttcatagcaatatctccacttattccactatttattgtttaaatacatactgagcatcttctactctctggcttgcatgccagacacttgggagtcaaagtaaacatacccacattcccagagcacacagcctgtgaaggacactagtgcaggaaagactgcctcccaatgtgacacatgctatcccagcattgtgtttgtggctcaagggtgctcagaagagagggtatctataaatcccaagttatcttgctgccatcctgaagatgaatgtcacacccaagcacccagctgaagcaggacaacacgattttaataaattagagaatattcaccaggtgactgctcatgcaagacaacaatctctgcaacagttttgtaattaatgacatcacaaaacgaataggctgaatcttacaacagccctcggtctataatctaacatcataccaatgtacaattcctgaaaagattttcaagaggccttgcagttgcttaggcaacaggcattgcagaactacctactaccattacctgtgttccagcagaagaagcccttgcctccaggcaaacccaattcagcatctggaaatcccaggatatgtagggaagtaggatgtgcaagtgctagaatgggaagaacactcccctagtttaagggatttgggattctcaagctgactgcatggccaacatggatcacatgctcattccaggcaagccaagcagatagtgaggttatgggattgcccctgtctgaaactgtgccatttgtgcatttgtgctcaggtatctcttttcagaatatgtgggtaaagtgtgactttaccataaccatggactgaagataaatagtattgtgatccagaccacctgagaaatttacgtctctacacagtgactataatcacagtaagcatatgttcttctcacccatgtggaagcgacctagaatccaaagagactgctctgatgcttgttctgtatgacggtgtggtatcagctgggcaccatttttgtcaatgtaccaatgctcactatagatacagatggcatttgtttgctgttatctagcagttacagtagagtataaaaaaagaaatctcaatgctcatgcccatcatattggtccaattgttctgaaaccttgcaggatgcaaacacaaggaaggagggcagagacagagcagacctcattcctgagcgtgtatgtagaagtgagtggatcatggaagacttcgtgtaataggtagaattttaaccgatgactacaattaacccagcattattattgtaattataccctagtaaattttgccagtcacctaaatttttgtattgggcaaggagagataaatagaatctggacagatggaaattggacgagagataatttacagtggcaccgttaataaaagcatagagttttttggggaatggtgaataattcatacatgtgttttattccttgtgtcaccccatgtatttggtcatggtggcaagatccatcttaaatagaatcacaagactggagtactcggaataatgagcattaacttttgtggccttgaagtgataggggttggtgttcgttttgtgatattcacaggggtgagctctatattaatgtaaagtccagagagggccaggcagggcagcccaacaggacaaatcacaaaggcaatgccctgctctccttaccctcctcacggtgatatgtctagccctccagggtcagaaggcatcgattaaaaaaaaacaagaaaaagtctggggtttaagggagaagagaaaagcaatggaatgcagccccttctctggaaatccaacattgtaactgtcacataaaaattcagacccaaactctgcatagctttgatatggatgcccaaaaatttctattaaaattatgtgtcacctagcacctctttgtaacgtaatatctgtagtgacttgacattgagtttaatactcctgttttaacatcctggtacacatgtgagagaataatacatattaaccgcagacattctgaagaaaattgttattcccactccaggtgtgcaggcacacttgccttcttatcaaagacatgtacaattattgctgagagtagagatgcatgattcagacttaagttgtgtctgtaaaagtgtatgtattcattttaagagttattggaaacaaatatgataaaaatttaatatgtgcttaattttgtggaaggtgtctgttagtgcttactatgttatcttctagcctatgtgcctggtttacaaacttccttccagcaaaccccatgtcttcattcttggtgacttcaatatccatggaggtaagtccatagaacgaacaggtctttgttttttaagttttcgttgtaaattaattgtagactatgaagaagttatgaaaacagtacaaagagttcctgtatgcccatcacccaatctacagcaatatttacatgttaaataaatgtattatcaaaaccaggaaattgacattgataccatctaattatctacactacaaaacttatcaaatttcaccaaatatctatggtaccatcttaccaaattttaccactgtttgcatgcactcatttttggagtgagatattcctctatgtttcattccataacattttgtcacaggtgtagattcataaccacaatcgcattacatacagaagtgtttcttcaccacaaagatttcccttgggctcctcctactgtcatacccacagtatgtttcttcccaaattcctctagtgattgatctattcttcatctctataatttcatcatttcaaaagtgttatataaatggaatcatatagtatctaatcttttgactttggcttttttcattcagcataatgtcctcaggatccacccaactttttgcaggtatccatagcttattgctgacttttttttatactactgagtagtgttccattgtatggatgtactatgctttgtttcactattcacaagtggaaagacattgctgttttttctaacgtggcatttataaataaagcagctatacacgtatgtgtacagacttttttattttactttaagttctgggatacatgtgtataatctgcaggtttctaacataggtatacatctgccatggtggtttgctgcaactatcaacccatcatctaggtttttagccccatgtgcattaggtatttgtcataatgctctccctccccttcctgcccacctcctgacaggcccctgtgtgtaatgttcccctccctgtgttcaacggttctcatttttctactcccaattatgattgagaacatatgttgtttggttttctattcttgtgttagtttgctgagaattatggcctccagcttcatccatgtccctgctaaggacacgaactcattcttttttatgactgcatagtattccatagtgtatatgtactacattttcttcatccagtctatcattgatgggcatttgggttggttccaacctaacccactattgtaaatagtgctgcaataaacatacgtatgcaagtgtctttatattagaatgatttataatcctttggatgtatacccagtaatcggattgctgggtcaaatggtatctctggttctacatccttgagaaatctcctcactgtcttccacaatggttgaactaatttacacacctaccaacagtgtgaaagcgttcctatttctccacagcctcagcagtatctcttgtttcctaatttaaattaccattctgactgacacgagatggtgtcccactgtggttttgatttgcatttctctaatgaccagtgatgatgagcttgttttcatacatttgttggctgcataaatgtcttcttttgagaagtgtctgttcatatccttcgcccactttttgatggggttgattgttttcctcttttaagtgcttctaacttccttgtaaattctggatattagacctttgtcaaatgatgagattgcaaaaattttctaccattctttaggttgcctgttcactccgatgatagtttcttttgctgtgcagaagctctttagtttaattagatcccatttgtcaattttggcttttgttgcaattgctcttggcattttcatcatgaagtcattgcccatgcctatgtcctgaatggtattgcctagattttcttctagggtttttatggttttggcctttacatttaagtgtttaatccatcttcagttaatttttgtatatggtgtaaggaaggggtccagtttctgttttctgcatatagctagccagttatcccagcaccacttattaaatagggaatcctttcaccattgcttatttttgtcaggtttgtcgaagatcagatggttgtagatgtgtggtgttatttctgaggtctctgttctgttccactggtctatatatatctgttttggtaacagtaccatcctgttttggttactgtagccttgtgatatagtttgaagtcaggtagcatgatgcctccagctttgttccttttgcttaggattgtcttggctatacgggctcttttttggttttaaaatttaaagtagttttttctaattctgtgtagaaagtcaagggtagcttgatgggaatagcactgaaactataaattactttgggtagtatggccattttcacgatactgattcttcatacccatgagaatggaatttttttccatttgtttgtgtcctctcctacttccttgagcagtggtttgtggttctccttgaagaggtctttcacaacccttgtacattgtattcctaggccttttattctctttgtagcaattgtgagtgggagtttactcatgacttggctctctgcttgtctattattggtgtatagaaatgcttgtgatttttacaaattgattttgtatcctgagactgctgaagttgcttaccagcttaaggagtttggggctgagacgatggggttttctaaatatagaatcatgtcatctgcaaacagagacaatttgacttcctctcttcctatttgaatacccttcatttgtttttcttgcctgatttccctggccagaacttccaatgctatgttgaatatgagcggtgagacagggtatttttgtcttgtttccggtttttaaaggaagtgcttccagtttttgcccattcagtatcatattggctatgtgtttgtcataaatacttcttattaatttgagtatattccatcaatacctagttgattgagagtttttaacatgaagggatgttgaattttatcaaaggccttttctgcatctatcgagataatcacgtggtgtttgttatcggttctgtttatgtgatggagtacacttgttgatttgtgtatgttgaaccagtcttgcatcacagggatgaagccgacttggtcatgatggataagttttttgacgtgctgctggattcggtttgccattactttattgaggatttttgcactgatgttcctcaaggatattggcctgcaattttttttgttgttgttgtgtctctgccaggttttggtatcaggatgaggctggccttataaaatgaattagggaggagtccctcattttctattgtttggaatagtttcagaaggaagagtaccagctccttttgtacctctggtagaatttgtctgtcaatctatcgggtcttgggcttttgttcattggtatgctattaattactgcctcaatttccaaacttgttattggtctattcaggcattcaacttcttcctggtttagtcttgggagggtgtatgtgtccaagaatttttccatttcttctagattttctagtttatttgctttgaggtgtttatagtattctgtgatggtagtttgtatttctgtgggatcagtggtgatatcccctctatcattttattgtgtctatttgattcttctctctttttttctttactagtctagctagtggtctatctatcttgttaatgttttcaaaaaaacagtatggctatggctagctcctagattcactgattttttggaagggtttttggtgtctctatctccttcagttctgctctgatcttagttatttcttgtcttccattagcttttgaatttgcttgcttttgcttctgtagtttttttaattgtgatgttagggtgttgatttcaagccttttcagcgttctgatgtggacatttggtgctattaatttccctcttaacagtgctttagctgtgtcccagagattctggtacattgtctctttgttcttatcagtttcaaagaacttctttattagctgtgtcccagatactggtatgttgtctctttgttctcattagtttcaaagaacttctttatttgtgccttcatttttttatttacccagtagtcattcaggagtagcttgttcaacttccatgtagttgtgtggttttgagtgagtttcttaatcctgagttctcatttgaatgcactgtggtcagagagattgtttcttataatttccaatattttgcatttgctgagaagtgttttacttccaattatgtggtcaattttagaagaagtgctacatggcactgagaagaatgtgtattctgtaatttggagtggagagttcttttgatgtctattaggttcacttggtccagagctcagttcaagtcctgaatatccttgttaattttctgtcttgttgatctatctgacagtggggtgcaaaagtctcctgctattattatgctggagtctaagtctatttgtaggtctgtaacaacttgttttatgaatatgtgtgctcctgtattgggtgcaaatatatttaggatagttagctcttcttgttgcattgatccctttaccactatgtaatgccctcctttgcttttttttctgtgttggtttatagcctgttttattagagagtaggattgcaaccactggttttttttttgttttgtttttgttttgttttttctttgctttccatttgcttggtaaatattgctccatccctttattttgagcccaagtgcctttgcacgtgaggtgggtctcctgaatacagcacacctacgggtctggaccctttacctaatttgcccatccttgtcttttaattgggggcatttagcccatttacatttaaggttaatattgttatgtgtgaatttgatcctgtccttatgatgctagctggttattttgcacattagttgactcagtttcttcatagtgtcattggtctttatattttggtgtgtttttgtagaggctggtactggttttttgtttccatatttagtgcttcctttaggagctcttgtaaggcaggcctgggggtgacaaaatccctcagcatttgcctgtcaggaaaggattttatttctcctttgtttgttgagcttagtttggctggatatgaaactctgggttgaaaatacttttttttttttgactgttgaatattggcccccattctcttctgacttgtagggtttctatagagagatctactgttattctgatgagcttctctttttagatagcctaacgtttctctctggctgctcttaatattttttacttcaacttaactttgaagaatctgacaattctgtgtcttagggttgctcttcttgaggggtatcttagtggtgttctctctatttcctaaatttgaatgttggcctgtcctgctaggatggtgaagttctcctggataatatcctgaagtgtattttcgaacttggttccattctccccatcactttcagttgcaccaatcaattgtaggtttggtcttttcacatagtcccatatttcttggaagttttgttcattccttttcattcttttttctctaatctagtcttcatgccttatttcagtaagttgatctccaacctctgatattctttcttctgcttgattgattcagctattgatacttgtgtatacttcacaaagtccttgtgctgtgtttttcagctccatcaggtcacttatgttcctctctgtactggttattctagttagcagttcctgtaaccttttatcaaggttcttagctttcttgcattgggttagaatatgctcctttagctcagaggagtttgttattacccatcttttgaagcctacttctgtcaattcatcagtctcattctccatgcagttttgtgtctttgctggagaggagcttctaacatttggaggagaaaaggcattctggtttttggaattttcaatatttttgcactgcttattcttcatatttctggatttatctacatttgatcttttaggccgataacctttgggtggggtttttgtgtgggggtctttttagttgatgttgatgttattgctttctgtttgctagtttgtcttctaacagtcaggcctctcttctgcaggtcggctgcagtttgctggaggtccaatccagaccctgttcacctgggtatcaccagtggaggctgcagaacagcaaaagatggctgcctgatcctttctctggaagcttcattccagaggggcactggcctgatgccaactagagctctcctgtatgaggtgtctgtccacccctgttaggaggtctctcccagttgggaggcacgggggtcagggacccacttgaggaggcaatctgtcccttagcagagctggtgcactgtgctgggagaaccccccttgtcaggatcagctgctatcttcagaggcagcaggcaggaaagattaaatctgctgcggttgcgcccacagcctccccttcccccacgtgctccatcccagggagataggaattttatctgtaaacccctgactgcgcctgctgtctgtccttcagagatgtcctgcccagtgaggaggaatctagagaagtagtctggccatagctgcttagccgcgctgtggtgaattccgcccagtccaaacctcccagccttcttagcactgtcaggggaaaaccgcctactaaagcctcaggaatggcggatacccctctctccacaaagctcaatcgccccaggtcgacttcagactgctgcgccggcagtgagaatttcaagccagtggttctttgcttgctgggctctgtgggagtgggacccattgaggcaggggaccacttgtctccctggcttcagccccctttccaggggagtgaacggatctgtctcactggagttccaggcaccactggggtatgaaaaaaactcctgcatctaggtcggtctctgcccaaacagctgcccaatattgtgcttgaaacccagagccctggtggtgtaggcacacgagggaattcctgatctgcggatcgcaaaaaccatttcaaaagcgtagtactgggctggtagcagggttcctcacagcttcccttgattgggggacaggtgtcccctggctccttgtacttcgcagatgaagcgatgccccaccctgcttctccttgctctccgtgggttgtacacactgcctaaccagtctcaatgagatgaactgggtacctgagttggaaatgcagaaatcaccagtcttctgcgttggtcccgctgggagctgcagaccagaactgtttttatttggccatcttggcccccctcctgtacagatttttaagtgaacacagtttcccagtttctaggatacattttccaggttctaggatacgctggattgctggattatatgaaaatgcaagaagatttcccagagtagctctactattttactttctcattggcagtgtatgagacctccaattccttcaaatctcagccaatatttgaaactatcagtattttatattttagccatattgagagggtagagtggtatctcgtgacttttatttgttgtcctaaacattagtgatgttgagcatctttttacgtgtttatttgtcatgcatatatgtgtttgctgaagcatctgttcgtcttttaccctgattgaatccagctctccactaactccatgcctgttcccatagaactgagggtggctgcagcacaacacacaaccatgcccagcggtttcactgttcatttatgaccttgaacctgaaatgttcacttatatctcctgaacagtcatgtgacatttccataattgcctctcatctccaaaggaaaaccttcagccatcgtctgtctcctgaaaccacctactctttatttatttttttaatcactgtcaggtgatgctcttctgagaattactcaatctccccagagcgaacctacctccccatgtgcctctgagcacacctctctgcattttctctcatgccaggaaatgggctctgcaaattcctgtttgaaaccaccctttccatttgtgcagtttccccttttgcctccccagaaacattttatagcattattgcctctcccttctacatcttcaatgtttccttctctaatggatccttccattgcaactgaaacaccccatcctatttgtggcataaaacaccatctaagcaaccattcgtctctatccacagcctgatttatcttctttattttagaaaaaaatatcttccaaagagatttctgtactcattatcttcatttcctcacccttcctcatatcttctcatatctctaactccctctcttagctagatcattaaatttatgttttttgtttgaaaatttatttgtgacatggtaataaagtcaaagctttcaaaaataatctttaaatacactcactgaaaactgtcattcccattttaggtcctcaggcatccttgccttgttaacaaagacatatcctattatacttactaataagtgtatattaattcacaaatatttaataataaaacaatatatatatttttcatacaatatatacattggtctgcattctttttaaaaaatctaacaaattctgcagggccttttatatcaggtttgttgctctttctgggtagctacagagtattctattgcatagatagacagtaatttatacagtattgatggccattttggctgttaccagtttttgactgtaaataacactgcatttattaactcagaacatagatcttttgaacatgcacaaatatatctctaagataaattcttagatgaggaattacagagagaaaaggatggtgctttatacatgcttccatatgttgaaaacagccttcactggaagttgtatccatctgcatccccagcagaaatgagtgagggtacctgatcccactccatccccacactgtatgctataaaacttaatggttttttagattttggtaaataaaatataactctgtaatttcaattggcatgtctttcattatgagttgaatttctcctctttccatatgtttaggagccatttttattttttagaaattgtgaatcatgacttaaagttattttcttattacctttttcaattttgaattattaacatcatttagaaaaatttgtatcaatagagaaaatttatactttggctataacatacattaccaaacatctcccagtttatttatttaattttattaatttactaatttatttcttgagatggagtctcgttctgtcacccaagctggagtgcagaggcacagtcttggctcactgcaaatttcgtctactaggttcaatccattctcttgctcagcctctcgagcagctgggattacaagcgtgtcccaccacaacgaattaatttttgtatttttagtagagaccaggtttcaccatggtgg

SEQ ID NO: 85 - DNA, 8025 bp, synthetic construct; identical to SEQ ID NO: 2
  source 1..8025: mol_type = other DNA

SEQ ID NO: 86 - DNA, 32767 bp, synthetic construct
  source 1..32767: mol_type = other DNA
agtgatcactctcagttcatgagtgaaaaaagttaggtttagaaaggttatgaagtttttatatggcagagaccctataagtaaaaaggccaggactctaaaccaggtccagttacagagccttaatgtgttttctctcacactcgctctctcgctcgctcgctctccatctcccgctgtcccactttccccatttggtgcagtaaattttaaaagtagagacattccctggaaaaagggaagtcataagggataaaattatagaagttgaaaaattcaacgttttgtgaatgctgaatactaaaggtaaactcagatcctattcagataaagatatatctgagactgaagggcttactgactactggggggaaacgtaatatgcagctggttataatatgtgataatttttatactgtgagtgtacattgtaatacacatataggcaggaatgatgggttctgtgttggatatcagaggtgaagtgagtaaagtgggctcctgcagagaaaggaggactttgtcaattaaagaaggcaattttattaaacacagaggcacttttaaggagaagagtccaccacagatatgagacctaggcatccagcttatagttcttcagcctggaggataaagagatatgaaccaaggagacgatgcaatccctattgcagagattagctagaaaatctgagcagaattactctggacacctcaaatcccttctcagacatgttttatttttccctttggtttttgaactttctcttctgttgtctgttcctttccataaattctgggtctgcattcttagctatgatggttaataaagaactccaatgaatgatttgagtcttcacaagtggaaattttcatctttatgttcggtaaactaaaactttcaggcttagacacttaatcatctcctcatctgtatggaaacctctgtcttcaactacttataatcacacactgactcaaataattctatctcaactccagccctaggttctactctctatccaggtggcgtaaccctatactccttgattctggtctaggctttttgaaagcctacaccttcaaatgatccataagttctcagtccacatttatacacaattttatcaccatttttccttattttctccctccatgttgtcctgtaataaaaatctgttgagcacctcctaggtattaggcacaacaatttagagataaatagggttgctcttatctttaaaaagtcatttcttagtgtgacaagtaaaacaccatgttggaactatttgttaactcccttccaataatggagatcctcaacaagggctagtggaaaatcttactgaacttagcagaaaagctggatcttaagctaagtgttcaagtaaatgggattttgttggaggtcatgatgaatatgaggaatgacatcctaagctgaagtgacagcaaatatagaagtgtgaaaaatagagtccataaaccccaagtctctctacttgtatgtttatgcaaaaagcattcaaaaaatggcatgagatggtagagttggattctagaatgtgttcatatgagggaaagaaaaatgacaactcaagagtgttaaggttgaggtgacctcaaaggaacacttagactgggtgcagtagctcatttctgaaatctcagcactttgggtggccaaggtgggaggattgcttgagcccagtagttcaagaccagcctgggcaacatagtgagaccctgtctctaaaattttaaaaaaggagaacacttaaagtgggttttctcaattaccaagcaaaacctatcttatacatgaaattgctcgtattgtctatcattctttttaaaatatatttattgagacatgattaacatatgaaattctccttgtacagtatataattagatggttttagtatattaacagagctgtacaagcatcacagcaattcaagtttataacagttttatctctgttgagagtcactccatattccaccatcacctaaccctagaaaaccatgaatttactttctgtctctatagatttatctgttctagacagttaatattaatggaataatataatatgttattctttttcttttttgtttaacttttattttaagttcaggggtacaattgcaggtttgttacataggtaaacttgtgtcatggggatttgttgtgcagattatttcatcacccaggtcttaagcctagtacccattagttatttttcctgattctctccctcctaccaccttccaccctccaaaagaccccagggtgtgttgttctcctctatatgttcatgtgttctcatcatttagctcctgcttataagtgagaacacacagtatttggttttctacttcggtgttagtttgctaaggataatgtcctccagctccatccatgtctcagcaaaggacatgatctcattcttttttatggctgcatagtattacatggtcagtatgtaacacattttcttcttatacactgttggtgggagtgtaaatatgtgattttttttttgtgattggcttctttcatttagcacaatatttcaaatgttgtagcaggtatcattatttcattcctctttattgctgaataatatttaactatgtggatgtattatattttatttatccattcatcatttggattgtttccacattttgagtattatgaataatgctgctgtgaacattagcgtacaatttttgggtagatccattatttcaattctcttcactatatacttagaggtgaaatttgtaccactatgtttaatttattgataaactgctctactggttttcaaaattgttgcatcattttatattcccaccaacaatgcatgtggtgccaatttttcacatccttgctaacatctgttatctgtatttttgtttatagcaatcctgagtatgaagtagattctcactgtagtcttgatttgcactctgctaatggctaattatgttgagaacgttttcgtgagtttactggatatctgtatgtcttctttggagggatgcctattcaaatccattgcccatttttaattgggttatttatcttttattgctgttcttcctatattttagatagcagttctttattagatatatgatttgcaaatatttttatcatgttatgtgagttgtctttttactttcttgattgtgtcctttgatacacaaaagctttaattttgttgaagtctaatttatcaaacttttgcttgtacttttaggatatttgagaaactattgcctaatccaagcttacgatgatttactcccatgttttcttctaagagttttgtgcttttagctctcatatttaagtttatgcttctgagttaatttttgtgtgtctatggtttaagaaaggggtctaagatcatgcttttgcatattgctatccagccgtcccatttattgagtattgttctttccccattcaattgtcttgacactcttgttgaaatcaattgaccataaatgtaacatttatttctggattctctattcctttgacctatatatctattctttttccatcaccagactgttttgattgcagtagctgtgtagtaagcttggaaataagaagatacgactccttcaactttgttctaaatttttttcaagatagttaggttattctagggccctgtcctgttcctacataaattttatgataagcttgttaacttctacaaaaagccaagttgggattttgatagggttgccatcaaaaccctaccaaattgttttgagaatcgtttgggtatttttgccttatttttccttattcattaatatggtatgtattttacttttatttacaggtttatcaattttattgacttttttaaagacagccttttgtttcattgatttttcctgttgttttccatttttctattttataggattctcctattatctttgttatttcattctttctgcttgctttatatttattttgctctttataattccttgagttagggaattagggtttttttgagacatttattcatagccaatataccctttaagataaaaagttttcacctcgacattatttagtggcattttacatattttgatatgttataattttttttcattcagttctgtgtattttaaaaatttcctttaaggcttcatcttaggccctacgtattttttaatttcctttaaggctttctcttaggaccatggatttagaagtgtgctgtttaatttctacagatttggagatattccttctgttttatgttattaatttataattttatccctttgtggtcaaagaatacactatatatgactttaattcttttaaatttattgaggtttgttttacgaccctggatatggtgtatcttagtaattgcttcatggacacttgaagaaaatgtgtattctgcaattgttggatgaagtgttgcatatatgtttgttagaccctgttcactgattgtgttgttcagataatcaggatatagaatctttgctgattttctgtctggtgtttttatcagctcctgagaaagagctgttgaaatccccaactacaattatgaatttttctgtttctcctttcagcactctcagattttctttttttcttttttatttatttatttattattattatactttaagttttagggtacatgtgcacaatgtgcaggttagttgcatatgtatacatgtgccatgctggtgtgctgcacccactaactcgtcatctagcattaggtatatctcccagtgctatccctcccccctccccccaccccacaacagtccccagagtgtgatgttccccttcctgtgtccacgtgttctcattgttcaattcccacctatgagtgagaatatgcttacatgtattttgaaactctgttttttgatgcatatatatgactggtatttcttcctaatagcttgcttttttgtcattatgtaatgtccctttttgtatttaataattttctttcctctgaggtcaactttatcagataacaatatagcccattctattttttttttaattaaggtttgcatggcaatttttttcatcattttactttcaacctatgtatgtcattgaatgtgaagggagtttcttgtaagcagcatttagctgaggtatactttttatccatttttttgttgatgtattcagacctcttacacttgaggcaattattgatataccagtacttaagattaccatttattagttattttctgtctgttttctctggactcagatctctgtttctcttttctcttcttcctgcatgttcctggaacatattttaggatttcatctggtttaattatagtgattttgagtgtatcatttttggtagtggttgttctgagtattcctgtatttatttatctctctatctatctatctctttataagtctactggtatcactattttaacctcccattttcttctccatttttataatatcatcatgagaatgagactatgctataattttgttccaatcatcaaacatcacttagaaagcacattgtatgcacctatatttctgctttttgtagtattatttcttccttcctgatgctccatgatctcttcttttattcatcttttctgttagaagaattctattcagccaatctttaagaattatgtctgctacagaatgtaaaatatcttatgttctcacttataagtgggataatggactctagggactccaaagtgaggaaggtgggagggagctaagggttgacaaattacctgttgggtacaatgttcaatatttgggtgaggtggtgggtacactagaagcctaaacctcaccactactcatgtaatacccatgtaacaaagaagcacatgtacatcttggatcttcaaaaaaaaatactctccgtgggtgcacattcacagttgaaaattgtagttatctaagaggattctttttaaatagtacatctatgttgtatacaggatttgggggcctaatgtttctcattcttgctttacaatttcatattactgtgtttcttatttagaaccatttcttgacaacagtgtattgtggttcagttttacctatgtgttatgattgaatttcaatgtcaatttgcaactctgtgtgtacactttaagtcaatacggggtttaatgaaaatataagtcagtgatttctatcaccatcatctctctctggctgcatcatctgtctctggctgcattccagatttttctgcctttaatattcaacattttaatatgatgtgtctggaaacttttcagaaatgcatattcagtggccctaccacagaatcagaaattatggtagtggggcttgtgttagcaagcccttcaactgattctaatgcacagtaaagtttaagaaacagttaccgagatctgtaccagtagctactagtcatatgtgactattcaaatttaaaataattagcaaataaaatcaaaactttagtttctaaatcccactagccacatttcaagtattcaataaaagcctgtatctagaggccaccgtatttgatagcacatatttattccattttcatcatcttagaaagcactgctaaacaacattgattgaagaataaatgaaatttgtcagagtagtatatttgtaacagtttatcagctgtactggatatcttccttttaccctgccagaactactctttacccttcttctccttgtgctcagctcttagagactcactcacaagagctgtttcaatgggttctcttgacctccggcttccggttgggtttgaccaatgggaagccccggaccaagtgtttgctccctccccagtcactgggtatagtttccgttctttacctatggccacaatttctgtaaatgtttcttatatctacatctaatctctagggcaatttttggtaactattcctttcttgtcccttcagtcttagaagcagaatcccttggtttctccttaaaccttgcctacagtatttacaggcccctttgcttacttttcttcagatggtctccttggagtgtgacttcttctttctacaataattgcatatccctggttcatgcatcagctgaacttttggcctttagtaggtttagaaactgaaataactcaaattttatctcctatattagtgttccccagagtaagcttaaatcttatttctctccattaaaatcaagataaagagagaaaaaaagaaaaatgaaggaaagaggaaggaaagaatgaaggaaggaaggaaggaaagaaggaaggaagggaaagaaagaaggaaattatctattatagggtgcatactatgattcttgtattttgttgagtatgttgcacaagcttggaaccacagtagaactgctcataaaaatgagtgccatgctctgtcattctgaggagcaaaactgcaaacaattcaggacacgcacagtgattaaaactcttcaatatttttcttaataaataggagctttagccgggcgcggtggctcatgcctgtaatctcagaactttgggaggccgaagtgagtggatcacgaggtcaggagttcgagaccagactaaccaacatggtgaaaccctgtctctactaaaaatacaaaaattagctgggtgtggtggcgggcgcctgtaatcccagctactcaggaggctgaggcaagagaattgcttgaatctgggaggcggaggttgcagtgagcagagatcatgctactgagctctagcctgggtgacagagcgagactccatctcaaagaaataaaataaaaaataaataaataggagctttagatggaataaaactttattttctaactaggtatcatcattaagatgattacattatctgaaacctaacctgaatataattgcacagtgttaacaggtagcatagctgtctaacataacatcccatgataattgactcttaattaactgtataggtattataagcagtagttgctaatcctacattgacttttacttttttgcttagtagaaatctctccaagattcctaaacaaaaactaacaggaaggaatttatcgtgaacccatgaaacagtgcaatgtaaagcagggatgcctttttgatctttgagtatttcatcttgtttcatatgtgaaagagcccccttggtttgctgaataaatatttctttttaattgttctaacaatcatgcttgatagttctggtcaagaaaacgatttgttttctcaactgagtgaaccttctttagaccaagttggagcactgacatatttaggacaagcaagattccatgatagtaacatcagtttgattaagggagacgagtggtttttattttttttaacatcacagaagtgacgaatattcatctctaagatgtctacttttctcttgacctttaaattactaaatatattgctgtgtcctcacattgctttctgcagaaatacaacaacaacactggatccttccagtgtacgcaaagattctgctgcagtgcaacccaagcacaaccagccaaggtctgctggggatctctgctgctgcagcattttatgcacacaggaaaggtattgtgaataatgtacagttataagcaggtgaccaaatcaagcttccttcacttaatgctattcccaagtacactctgagggaagtaattggatacctttattagcaattgatctatagaggaagaaagtgtgatgaaaagccttgcaaggcattgattgcatgtgcattagcttacactgatctgcagtacttttacagaaaactcacataaattaaaacaataaccagaattctatcactaaacagaaatataaaatatatagaagcctcaagtatgaaaatccagagaaattctttcactatagattatttaagaagcaaaagcagctatcatgaggccatcttataattggacaagtgcttgtgatgtactattcagtgctgatgtgccactgatggactagcttgtaggatatgaatccactctgttctattttcttaacaccgatgatgagaagtgtcaggagatgccaggcaccttcctggaatagctatcattattccccagtataatcacattaccttttgattattttagataaaaatatagaggatatttttccctcaataacagactatgcattaaacgtacaatataacagcctttgtgcatttactttaattagccaaaattattaacacaattgcctaagtgtaattgctgctattgatggggggagagtggatgacccccatggtctcatcatatactacagatatcagcctcttgactttttacacaaatcaacaagcaaatggaaatgtggtgtactattataactataccatgaattattatgtagtaaacacaggcatgcctaagacattataatgttctctgtatgttttatattgattgttttcccttggtgaatattgttattaataaatcttgtataatattaattgtatgggatatttttctttctgagattataagatagagtcattcacgtcagtgctctggagattctatgttgttgattatagaaagttttatttaatcattactctgtcattatgctctccatgtcttagttatccctgctcatcttcattggtttaatgcataaaaattaaatattctaatgctgaagagaaaaaatgaaatttcaagctgtcgttattgtgggggtacaatcactgagaaaattagatttatttaaggttatttaaaagtaaagttagggtcttctgtttccatttaggatggattaactgttgtggaaactgctgtgtcattgtaaaactagaaaacgagataaagatatgaaacgaatgtctttagacattgaaaaataggtaacacaggactgtgaaacatgacagaagggatcctgagacaacaaaaatgtgaggatccctgtcctgtatgaaatgctactctggacctgacttaaatatactttaagcctcaaaaaggttaaactactctgaacatagtttaagtgcctggtatattttagaaatataataaaatatagcacattataaaattcacactgtccagtgtccagtgaaaatatttagggtagggaagaagcagataatatgacttttaactagaaggaaaaagaaacaaaaatcggttaccatataaactatgaaatcagcagactagaatattaaactagctattatatatagtataactgtgaacaaaagcataaaggaacacataaatgtaataagaagagaaattggaaatgttttttaaatacccaaatggaagtattagggatttttaaaaaatcatccaaaatgaaaaataaactgaatgggtttaaatgcagattagacactgcagaagagatcaatgaacttgaagctgtaggaataaaaactatctaaatttaacaaggagaggaaaaaacaaagtgcttctatgacccatgagccaatacgtagcaatttaaaatatgggtaatatttccaaaatgaagataaatagatgctttttaagacaaacacaaaataattgaattgaccaccagtagtgctatactacaggaaaggccaaaggaatttcttcaggcagaaagcaaatgatatcagattgaaatgtggatgtaaacaatagaatgaagaacactagaaacataaacatgtggattaatgtaaaaaacattttatcattttgaatatattttaaaagattgtgtaatgcaaagataacaacgtctgttgttgatgatgtatttgtaatacatattacatatatataagaaaaatgtttaacaatagtacaaaggacaagactgatgaaatagatttatactgaattaagatttgtatactacacatgaggtagtataataatagtatttcaagttaggctgtgataagttgaaacaatatattgtaaattgcagaataataattaaaaatataaaacaaaaagaaaggctaataagccaatagagggaatatattaaaatcctaaaaatagcaaattatttttaaaaatttgtaaaacaaaaaggaacagattggaagaatagaaaacaaattgcaagatgattgatttaaatgacattatatattgataaaaatgttaatagttacatcattaaaatacttctaaacataacttaaaattaacaatgatgtcaaatagaaattttaaattacaaaacccacattacatatgaagatacaaacagattaacaacacaaaattgtgataaaatatacatgcaaacaattcaaagaaatttggactgaccgtattaaaattgaaaataagtagatttacaagaaagtgatattatcagagataaagatgtatattttatagtaataaaggaggcaaattaacaagaataaatagcaatcttaagtgtgtatgaatataatagcatagcttcaaaatacataaagcaaaactgatggagataaaaggaaaaataaccagttcctaaatataatcagagttttcaacactcctctttcagtaattagtagaacaagtacacaggtagtcagaaagaatgtagatgtgaacaaccaacttgacttcattgacatttacaacactctcctaacataagcagaagacacattcttttcaagcacaagcaaagtattaactgatacataataagctagaacataaaacaagtgtgaacaaatttgaaagcactgaaattattcaaatatgttctctgactccatcaaaattaaactataaagcaacaaataagagctatatgtaaaatcccctatttaaaaaaaaaaaggaaaagtcatttctaaatgatccatagatcaaagatgtagtaaatctgtctttatttgcagacaaatacattacctacacctaaaatcttactaagtttttagaaggaaaaaactattccacctaatagagtttagctggtacaaggtcaataaacatagagtgtttccctataatatgatttaattactgaaaaattaacttaattaaaatgtcaaattcaatgtacaagaacattttttaaatgaagtacttagagataaatttgacaaactgtgtgtaagacctatactgtaaagactataaaacattttttagaagacttaaacaagacctaaataaatggaaaaaaatacgttgctcatggattggaaaatccaatattgctaggatataaatttttttccaaattaatctgcaggttcaacatgatcccaataaatatcacagtagatatcatcaaaccaattataaaatttatatggaaatgcaaagatcctagaatagcctagataaatttgaataagagtaacaaacttggagaacttttattacctggtttgaaaaacaaccagaaagctgcaataatcagggtagtgtagtatgagggtaagaattatgtgccaagctcagtgttaaggtctttatataaatacagttttatttaatcctcacagactcatacaaggcaggtgttattattcctatgatgagagagctagggcccagagtgttcaaataactctcaggataacacaattaacaaacttcacctgtctctgaagcctagccttttaagacacaatagtatgttttatcccttcatagagttgtttcaaattctttctaaaaatggatgttctttaatactgactctaaacatacttgttcagatatagaaattccaaatttaaatgtaggacagagaagatgatatctcattattttacagctcattacccgtcatatttcaaagtaaaatcactgaaaaataggatagaaagtcaagtgattgcgggaataatgttaaagaaaataaattagtcaaagggagtcattatgttttcaattcctgagaactccaatgttcttgccaacccaacctgatgacacagatgattttccaaatatatatgataaaggtgacttccaaaaacctgtagagtagatcatttaaagctacaatgagccagtggccatcatttcggctatcgccctcctcttccttctccagatcccatgaggctgatgcttgtgatgacatcccttaatgccaatggcctagaaatttagcaaaggtaaatgtgtcaattgggtctcagtttgcacatctctggagatctggttcagatatatatttttgagggtgtccaaaagttacaagaatatatggatggctgaaccttcagacaaatcccttttgttccaacaacattgttgaagcatggaatttgatatgatttggctgtgtcctcacccaaatctcatcttgaatgtagctcccacagttcccacatgtcttgggaaggaactagtgcgaggtaattgaatcatgggggtgggtcttttccatgctgttctcctggtagtgagtctcacgagatctgatggttttataagggggagtttcccttcacaaattctctcttgtcgtcaccacgtaagaagtgccttctgccatgattgtgaggcctccccagccacgtggaactgtgtgtctattaaacctctttttctttataaatacccagtttcggttatgtctttatcagcaggatgaaaatggactaatacagaatatgatgatgaatactctgaaaagaatagggagtgcaagttatctgtgtttattaagtccagaatttttgtgcattgtttaagttggggtactctccatggtttaatcacactacaaaatctgtgataaaaaatactataataataggatctccagacaagaggttgtcaatactagctcatgactggtaccagtcattgaggagtttttacctctcctcaacttctgacttttccatggtggagattagtaccttcagtctacaatataattataaagagccatagttccggggatgggggacttccagtttctttcccacagctcttacagttctaaccattagccaattcatgccctggcctccaaccctttcattctaattctttcatagaatgagaaaaagtcataaatagtgccagatgctggaagatgagactattttcctcaaaactcctgtagtttttctggaatgatattacatgtagcaactgactttattttcctcaatattactatgcaataaaaacttatttctgatacagatgagtcagcaaaagatttctatggaagttcattgggaagtactctctgtaattatagctgagaggaagcaggaaacaagattgtgcaggagaagcagaacggcagtgcagctgcaacagcagcctcagtgaaatcatgggaagctctaacttgtacccaagcaagcgatcaggactttaatactcatgttaaccagtcattagatgtgggctgcctctgagaaagggtcaaatctttgagtgcagctgtttcctttagttaaggacaattcccagagagaatcacagctatgagccatctgcatcccatactctctccaactgaagaaatgaatccgttgttcattgttcctgaagggggatgggcaacataacacagttctctgtatatcttactacctcacatacattggatcctgggatatactcaatatttgttatcttttctgtgtattgctatcacatatggatccctaatgtgacaagtgtgaatccagaaaatagttacatacaatatgatatttcaaaatgaaattgtaacttttaaattttgtaaataaacattatttctctacacattaaggaatagagagattgacaaaagttttttttctgtgaaatacattactttattcagagattctgttctatatgtactcctttggtgttaaaaatatattttaaaaatatgtaatataggtattaaaccacatatttggccatttttcataaatgacaacatcatgttaatctctacacattcaacttcttcctaaatacttccacttggctgtctcacagcatctcaaaatcaataggtataaaacttcgctcatcatcttccaccattaaatctatttctcttataatactaactcttttgtgggatgggggggagtgttaatgaaattatcattgccatctattgtcactaatgtccaaaacttttctgtttattttatatgcctccatctactctcctacccaaattcaataagcacttacttcctctcaattctacttagaaaaacaaaccaaaaaacctactacttctgaccatactgctccattttcacttccctagtttctttaggtctttattttttctcatgtatgttattgttcaaacccttcttcccagcattatcagagtaatatgtacttttttcttttaaaataggaataatgcttctaaaaatcaaatatgatggtgacaatttatatttccacatttaaaatgtctcctttcctcattaagttcaggcaactcagcagggcatattcaagacctttatcacccatgcctccttttctctgggcttaccttccctcattcccaagccctccctcaacttcatcaatacagaaactgaagatttgcaaaaggccttgttcttgcataccatattacctctgcctgcaattccccctcaagccccatccatctaattcttgaacaaccttccaaggccagctcaagcatcacttgttctgggaagtctttgctggagtccaaataaagaaatagaataaaatgtgacacatactttgacacacactttgagggcataatggaagcatggaggaggggaatctaatccatacttggcaggtcaagcagggtttagagtgtgtgatgcccaggatctgaaggacaaaagaggtggctcagaaataagtgctggagcagagtggtccaccaaaggaaagtgcaaaagcaaagaccttgatgctagagatcagaatggatgttaaagaatttgaccttgatcctgagaaccactcattaaataagagaatgtagagagttggttagagttaggaatgctggcagttgacagagcagtatggagtctgtttctatagtccaaattaaagatcacagcactcaagctaaaatagtgcaagtggtgatagaaataaacaaatttgagagacttcagcatacatctttcaacaaaaaaagaaagaagaaatctctggtaaaaataagttttctctacgcttctttcttctttgcttaaataaaacaaaccaacttttctttcctagggaccattaaatctccaacacttgcccccaacctctttggcttttgttaacatgtggtagaattccttttattacattttttttttttttttttttttttttgagacggagtctcgctctgtcgcccaggctggagtgcagtggcgcgatctcggctcactgcaagctccgcctcccgggttcacgccattctcctgcctcagcctcccgagtagctgggactacaggcgcccgctaccacgcccggctaattttttgtatttttagtagagacggggtttcaccgtgttagccaggatggtctcgatctcctgacctcgtggtccgcccgcctcggcctcccaaagtgctgggattacaggcgtgagccaccgcgcccggccttttattacattttttgtgaagaaaaaaaatacaaagttgacccaaaagcaaagatataaagttctggcatagagctcttaccattaacatccatatttcatcaaaataggcagaaaccattgccagatacctctccccacatgtgcctttacttacaattgctctgcttttctttttctcctttctttcaagaggataaactagtgaacatatgaaaaaagtgagaggggatattaaagctatcattcaaatttcatatctgttcagaagactacaggtgtctattcaaagctgtgccacactcaggagtaatctccatttaatagtgtgtcaggtcttggaaaacaaccaagggcctgtaactaaacagagcacagctcttctgaagagtgtcactccaccactggtgctaccgcctacgttcccttaactctcctcaaacagtgctttgactctttaggcatcgaccctgttgtactgtactcgttggatacctgtctagccagggcttctacctgttacccctaaccaatcacatcttgaatttcctccaatctattttattgtaatggaaggagtaaaagtattttcataaatttaaacaaagtttgagatactatatttaaaaactaatgcttcaaaaaagtaattatatttaaaattttagaataaagctttttttaaaaattccagtatttacatccatttctactgtccctctgccttgtcttgttttaatttcatatatatttctgaaataccatattttctttctttttctgttactttaatttttaaatcaaaagagaatataacacaaggttatatgattaaaggaaggcctttctgtatcaggtgtgccctttgcataagctaaataaatatttgtggacaaaaatcacaagtaagcaaaaaaaaagttcccacaaaacaattataaattgttgaaattatgtctcagcaaaaacaaaaaaaaatttttttaatctgaatcagatctgtgaagtttactaactgaagttatctccttgcaaattactctaatatataaaacagtcagaagtggttgtttcagctcatctacagatggaccttaagtctgaacaccagcaaaatgtactttccgggccaggcacagctgctcaccctgtaattccagcactttgtgaggccaaggcaggcggatcccttgaggtcaggagttcgaggcgagtctgggtgactggtgaaatcctgttcctacaaaaatacaaaaattagctgggcgtggtggcgggtgcctctaatcccagatattcgggaggctgaggagggagaatcgcttgaacctgagaggtggaggttgcagtaagccaagattgcgccattgcattccagcctgggcgacagagcaagaccctgtctaaaaaaaatacatgcacacacacacacacacacaaacacacacacgactttcccccttgcttcgaatgtaaagaaactgttaatatcaaaaggttttttagatcacttcgtataataaaacattctacttattttgaacaccaggtggcagtaaatgtggcatttagccaaaaatgaaggtggaaggatgaaactgattttgaattttatgcatgaaaaggaataaaaaataatttagtacaaactttcctgtttacagaggagaaaactgaaatacatagaaatgaggagacgtgctcagagatacagtagtaactggcagatcagtaaatagcttctgtactctatccacgatactgtgatgcaatttaacttttctgacatgtttgatttcaactctacaggtttatttgcaaataaatggattactgagagatttatttgtttaatatttattttgttctacgtgtaacaaattttattttcaattcatatatataatgtaggtggccagtactttcaaaatgtatgtattgcctttaggagacatagaagagccatttctttatggagatagtgtagcatggtgcttaagcacacaggatctggagccaacttatttaggttgtcaccttggctcttccatatattagctgtgtggccttgggccagttgttcagcccgaaaaaaaaacggggattataataaaatcacctacctctaagagttgttggctaggcactgtggctcatgcctataatctcagcacttggaaggccaaggtgtgaggatcacttgtgtccaggagttcaagactagcctaggcaacacagggagatcctgtctctacaaaaaaataaatcaacttcaccaggtttattagtctgtttttacactactataaataactgcctgagactggataatttatttaaaaaggagggtttagtggactcacagttctgcatggctggggaggcctcaggaaacttactatcatggcagaaggtgaaagggaagcagggaccttcttcacatggcggcaggagagagaagagacaaaggggaaaatgtcccttataaagccatcggatctcctgagaacccactcgctattaggagaacagcatggaggaagctgcccccatgatctaattacctccctctctcaacaggtggggattacaattcaagaagggatttgggtaggaacacagagccaaaccatatcaccgggtgtggtagtgcacacctgtggtcccagttactcaggaggcgagatgggagaatcacttgaacccaggaggttgaggctgcagtgagatgcgatcatgccgctgcactccagcctggacaacagagcaaaaccctctctcaaaaaacaaacaaacaaacaaacaaaacgtttgttatatggattaaatgggtcaaaaaaataaagtttattaatataatgcctggtatatgttacaacttcaataactgttattaatctcactggcaagaaacaaaatttcaagagttaaatctatgacttttccgaatattttatgaaatcatgctgatcatttttatacagtattatttttacatggtattaccattcaacttgtcttctccacatttcacatgacaatacattttcagaatatcaacaggtttttttgagtgtaaataaattcagactttgctaaaacatgcctctggtttaaaatttaacatatcttattagacactacgcaaatatattctgctttttaaaatttttatttttttttattcttcgtcagtaccatgaaaatttgagtctatttactgaattgcttaaaatacggcaacgtaaaagtagtaaatgcaattaggctgaaagtaaaagaaatgttagaaaaaaaatcttgcagcaatggtaatcaataatttgaaaattttgatttaaaagataaactctaactcagcagtccccaatctttttggcatagggaccagtttcctagaagaccatttttttcacagacagaggtgggagatggttttgtgatgattcaagtgcattatatttattgtgtactttatttctattattattacgttgtaatatataatgaaataaatacacaactcaccataatgtagaatcagtgggagccctgagcttgttttcctgcaactagaaggtcccatctgggggtgatgggagacagtgagagatcgtcaagcatcagattttcacaaggagcacacaacctagaccccttacatgcacagttcacaatagggttcgcgctcctatgagaatctaatgctgccactgatctgacaggaggcagagctcaggtggtaatacaagccatgggaagtagctgtaaatacacatgaagctttgctcactggcctgcagctcacctcttgctgtgtggcctggttcctgctgtggactcctgctctgactgattattacttttatgataaaaacttgcagtgtgagtatctttaagaaacttagtatttagaatgtggatttctataaatagcaaactagtcttttacagctgcattgaagacccttgggccattaggtctctgtagacctccctggcctcacttctctctaaagcccctttaaaatcttcagaactcttggtccacaaactgattctatccccatcattgctttaaaacctactaacctggaaagaatcagctatcaccacatcttagactacacattcaaatttgccaatactccttcttaaggtaatcagaacaacaagaaaaacaccattattttcaaactccatttcatagtacataattaaactttcaatttagtaaagataatggaataaataaatttaaatagctgttatctcctttagagtaacagcttgggaagttatatcttgtatcattagcgatgggtttgctgaaatatttttaaatgtctcttttggaactatcttgaggacctatttatgtcttttttaaaattaattttcttttcttttcttttttccttttttttgaaacagcatctcagtctgtcgcccaagctggagtacagtgacaagatcagagctcactgcagccttgacttcccaggctcaactgatcttcccacctcagcctcccaagtagctgggaccacaggtgcacaccaccgtctctggctaattttttatttatttctttgagagatggggtttccctatgttgccccagcaggtcttgaactcctggactcaagcaatcttcctgcctcagcatccgaaagtactgggattacaggcataagccactgcacctggccatatatatctttgagggaagaaaaatttctgatccttgagaattaacttaataaatgtaatacatgtatgttaaatgaatatattgaaatatttatttaaagttacaaaagatcacagctacctataaattattataactgtttaacaaatgttgcattaatattttattgtttcaaatactattaatgacatatgtattcatataggaaaataaaagtctggaacaatagcagtcaagctgttaaaacaggttgtgaattaactttgttgttatagggatcattagtttctattttgaatgtgtatatatattccttaactactattccgagtgttgcctttacaatacattgaattttcatttctgatattgtattttccatatgtagaagttccatttttgtgtgttatatcttatatttctctcctcatcatattcagatttttctttactgtcttaagtatacatagccaacttaatattacaaaatttaatgtcctaatttgttaattccattatctttgtcatttctgggtctgtttttgttgattgacttttctgcgggctctagctcatattttccttcttctttgcatgcctgctcattatttttgattggatgccagtcaatgtgaattttacgttgttaggtcctttgagacgtgttggattttactctggctaacatataagcaaactgaaatcacctgggtccttttaagcctcacttttaagctttgttaggataaatccagagcaacgttagttaaagttaattcagccccactgctaagataagacccttctgcagagtctacccaatatctcctgtgttttgaggtcttttcactttgactggggaggataaaatattactatccctgtgtgaggtccaagaatttttaacctgctacttaagattacagtcatgtcagtcatgtgccagataacacttcagtcaaggacagactgcatatatgatggtggtcccacagattataatactgtatttttactgtaacttttctatgtttaggtatgattagacacaaaaataccactgtgttacaattgtctcagtacagtaacatgttgtacaggtttatagcctagaagcaataggctataccataaagactaagtatgtagtagactataccatctaggtttgtgtaagtactgtctctatgatgttaaaattgcctagtgacacatttctcggtacatatctccattgttaggcaatgcatgactgtagttctttctctggcttagggtatttttgttttcacacaattgcagaatgctgtcaagcaaaaacttgaggtctctttctacagatctctggtatactctctgttcagctcccttgtcttaggtgtcctgtcccaaataaacaaattctagctccctcagcctatcaaactcttattttctggctcttcatgtttccatcttcctgagctgtggtttagaaactttgtgtagtatgcagagacaatcacagcctcactttctttctcttctctagggatcactgtcttatagataatgttgcccaatgactgaaaactagtgtttcatatattttgtccccttatctaatggaagacttctacaagggaatgtcgataacaatagttttgatcaaaaataactccacagaaagcacattatcagcaaaaccattgttagggtaagggacccatcagtggactatgacactggggaaaattcttcaggaataagtaatcaattaatatacttactaagcatctactacatgcaagacaaaacatttatttttcttcacatcagttttctggccaaaaaaatccagaccacgtcaaattagacgagcaaacactcagatgccaatacatttaggaaacctcttttcttcagttgtttcattaagcatcatttgcccatctcatcactccaatctatgtctgataatcttcattgtatattctatttctttttagttataatttgaagttctacttttgaatcctactttttagctatgtatacacaaaacttgtaactttattcttctattttcacaacagaataattgttttttcttactttgtaatattgccgtgcagccaatattagaaggtaaaagtatttttctaatcctatttaattagagaaaaacaaactctttcagtattgtattaattttattgccttaatattactgtctattttttgttcttccagaaacttctacagttttgaaaattgcagtggcaattgtggaaaatacagaagtgtggatatccatttatttctcactaagggaaataaaattcttattcctattctggtatggattgtatgatgttagttaatttccatgactcaacatttccacatttttctatctaagttacggaaggtcagttgtaaatatgattaggaacttattggttattggctttttcaaccagacaggctttgtctggttcccttaattcaagcctaccctttaaattttaaacgtaccatctacttatgtctacatctgacgctgtcatttagtgtttaatgaactctcaaggctgtgcagtgtagtatttaataagaaatttggaaagatactttttctgggtttaaaccaagataaaatttctagggctgccaaaagagcaagaaaaacacaaacagctaatgttctgtagactaggaatggcacataaaagaaatggaaaggaaataaatagttggaacatgaaagaaaattgggaaaataatgaataatatacctaatgctttgcctatgagctcacagggaaaatcctgcaagggatccctcagtcagaccaagaggattttatttttggttttatcattttccaggattttatgtttgaagatctctaacaagaacctagatatattgagaatagtaagttcttgttaatggatgcttaaagtggaatatataatatgttatatattatatacaacatatgtattatacataacatatattataacataatatagtaatataatatataacatgttataatatataggttatatataatgtataatgcattatatattccactctaagaatgtatctaacatatgtgttattctagatataacagcaaaggcataatctataagagacataattgctaaggtgaactgcattaaaattaaaaacttctgctctgcaaaaacggacaacaagccagtgttagataaatatttgcaaaagacacatctgacaaatgactgttaaccaaaatatacaaataaagcttaaaactcaacaacaagaaaagaaataacccaatgaaaaaaatgggccatataccttaacagaccaaagaagatgcacatattgcaaataagcatataaaaaggtgatccacatcatatatcacaggggaaatgcaaatcaaataacacttatggtatcaacaatgggcatgagataccaccacatatgtattggaataaccaaaatccagaacactgatgatatcaagttctggccaaggatgtgaggcaacaggaactctcatgtattgctggtgggaatgcaaaatgctccagccactttgaggacagtgtagcagtttctttaaaaactaaacatactctcaccatatgatccagcaattgtgctccttgatgttcacccaaaggacttgaaaacatgtccacacagtaaccttcacaaagatgtttatagaggctttacgcataattgctaaaacttggaagcaaacaagatgtccttcagtaggtgaatgaataaactatggtaccaccagtcaatggaatattattcagcactgtaaagaaatgagctatcaagctatgaaaagccatggaggaaaactaaaagcatattgctaagtgaaaggagtcaatctgaaagggctatattctgtattattgcaactataggatatcctggagaaggcaaaactataaagacagtaaaatgatcagtacttgccaggggttgaaatgggagatgaataagtggaacacagagaattcaggagagaactgaaattactctgtaagatactgtaatggtggatacatgtcattatatatttgcctaaccccatagaatggacaacaccatgagctaaccctaaatgtgaactacagaccttgggagataatgaaacctcaaagtaagttcattaattttaacaaatgtttcattctggtggggaatgttgataatgggggaggctattcttgtgtgggagtagcggttatgtgggaaatctctgtaccctcccttcagttttgctgtgaacctaaaattgctctaaaaataaaattttaaaaataaaagaatgtggcattgcttgcatctaataaaaaagaccattattcctattgcagttgaactcttcttcctatatctaccaccaatcagggaagagaaggcgatttgtccaggatatggcactgagaattatcacaagtgagctagttcaccttcattgcacagtctcagtcactgaagtttccttccttcaatagcacatcttacaagtcaagaatgtaaggtccaaagccccaggacaaatctcagaagcaaagaaagcagcagggaaaagtagaccctgggatttgatttccttccggttatctctaagcatcatttccatgatagaaggtgtggaagcaaataataaaagtgcccgtcactagtgtttatcctgcaaagtggtctgcccttttgagaggcaccctgccctatggccatcctttgatttcttcccttggtggaaatttcctgtttctctttgagaaagataattcaaccctgtttccattgttcttcctcccaggctgctgtaggaaagcgcacgcacacactccacacaaaatgaatttttaaaaaatttattttcacagtcgctcctaccagctctgaaattcagaacccatatgactgatggcatattcagataatcgggtcccaggtctggaaaagcagccttttccccacgtttctttccccacctaggacctcctctgattcttcactgcatcttcgaaagaaaatgtattatttgcttgcctggaagacgctgcaattcaattgattttatatatacatatatataaagaaaacagaaaacatagcctagataccggtcttgagcgtcaccgccccactcgcggttgtgagcaaagccctacggaagaaaccaattcccagcctagactcttcagagcccaaggtcggggaggcgctggcctggcggtgttgtctggctccccagccactgccccagactcagggctttgccattggtccccacctcctctgctccggagtttttctccagctccccaccaagccacacaaagtgacttctcggaaacattagccgattctgctgagcaggaagggaggaaagggatgatgggggcgggggtgagataagggaagggctcttctggctgctggacacacacacacacacactcaaacacacacacgccccacccaatgggtggccgtggatggcaggtcgtgcaaccccctcctccgccttctattagcgcatggtgcagaggctacagcgtcgccaccaccgcgcccctagctgggtccccgccctgcgccgcccgcaggagtggagagagggagggagggagggagcaaggggtggggacccgggcgcgctgggaggagtggaggaggcaaagcggcgcagctgccctcggggaggcggggctgctacctccacgggcgcgccctggcaggaggggcgcagtctgcttgcaggcggtcgccagcgctccagcggcggctgtcggctttccaattccgccagctcggctgaggctgggctagcctgggtgccagtggctgctagcggcaggcgtcccctgagcaacaggagcccagagaaaaagaagcagccctgagagagcgccggggaaggagaggcccgcgccctctcctggagccagattctgcaggtgcactgggtggggatgatcggcgggctaggttgcaagtaagtgccttttcttttgctgcttctgtggggaggggaggagaagccctcggtctttcgcccgtgctcgcctcaaccgccacacccacctgtgtctattttcacatctcggttctggaaccctgtattacgccacctggaaagaagagaggggagaagcttgaccgggtggttccagcaatgggaggaagaagggctggaagcgtagttatttcgatagctgggcagctcctgtgcggttttgactctgtgggtttgctgccaggttctgaaactgtggaaaggaagggtagcaatgcctggtggtttactgtcttttatttctgtttacgctagcagagttgttagatggacttcaattcaaggggcagctcacattttttacgagcaaaaagcatgtgctgtatttcccatctgcaaagctgagcgtgcagaaccagcttagcagatacaacctgtggggacagaaaagaaccccgcaccccttaagagcacacaaacacaaataattgacaggacagctctgcccctatttctcagcgcagattatttatttattttttcgaataagcactttatagtgaaattcagaaaagatgcagaatccttttaactttttatcgaattcaacttgggaaactcatttacttttaggaaaaaatggatattttcgtgccttatattcaagacaaaaatcagaacaagaaactagaaacattaatgccagtttttgtgattatagtaaacatttcactcattattttagttttttttttttaagttggagcgttcatagattatatctactctgatgttaagagcaatttacatgagaaacttaggggggtttttaagaagctagtgtcagtaagataaaagccaaatcaaagtaagctttcaaggaagtgatagcttgtcagttactgaataggaagtcagtgttgggaagttcagttcttttcagaaacatatttattattcttttctatttcttcttccctgtagacaagataaagattttctttctctttctttccttgttatttaaatatattttataatttttgctttaacatcaatataaacctattttatataaactgcaaaccaaatccaattattaaactgttcattttattgcaaattcttcagattttttccactatttaaaaaagtttataattttttcttataattatggtgagattttttaaaaattattgattagtttgaaagctagtcttatctgatccctgtgtcgcaaattttcatgattgttagactagcttatcaacaacaaaactctagacagaatatggtatttgatgtaaagaagaatgtgccctctatttaggcaactgatagtttggcttaagacaagttttttaaaattttgtagaggtttaaaaggaggtttccttaagtaagccactgtgcagttgtgggactcagtgatgtgtttttacagtgactggatatatgatatgccttgattcctatggtgcagggctaggctcacagagtacctgatgcttctacagaagaaagatgagtcaggtctggctctctgccaaaagcatcttgggcctcctttcccctagggcctgcatataatcatgggagcccttctgtggtaatgcttctatgtttttactacctgttgctgtgctgagtttcagaagcaaaatagataaacaaataaataaattcagaagagcaatcagtagggttctatttatttaatataatcaacccactttctctgtggcaaggaaaaaagtagaatttttcattttacatgaataataaaatctattttttatccaatttctattcctattagttatgcaaaagagtgtgaagtgctagaaggatttatatggtacttttctaagacaagtcatgatcttgtaaaagagcttaaagtttattgatgtaaatggaacattctagatgtcataatgataataatttatgactttccctaaaactctgtctcagattctttcctcccatcttcattatctgaataaatgccttcaccatccaagtattgaaatcacctttgattgctctcttccttattactccatttcagccctttccagcctgtaagtagatctatcaatcttatctcccaaacttatttctatttcatcatacgtctcagatgcctctcattcaccctcttttctgtatctacacggccaccaaattagttcaggtcatcatcataatttacttggaatcctgccacagcctccatatcaatctctccacttctgtaattttctcccctgcaattcattctctatacaaagcaataccatcctgtctcccctaacaaacattggctcacaactgcatttaaaaaaaaaaaaaaagaggaagaagaagaggagaagaagaaataaacatggcaacacagagaccaattagcaacaacagtaaatgcctttcctcagcatatggtttactctctgttctgtcccttctctccaacctcaccagaacctattctcttctcattaaggtgctcctgcccaggtcgtggctaaaacacatgaaacaatagcactctttaaggccttttcaaatgctgttcccaatgcctgaactctatgcgtgcttactccttcttaaactttaaatctcaactcgaggtttttttgttttggaaagatcatttttgatcatcttgttaaaagtaggttgtcccgtgttggtcttgatgttggaaccttgtttctttcatactgcttgttacagcatgcaggtattttgtgaatttgcataccaaatactccaagggaacccagactatgtcttcattgttgacttagcttccagaatagtgcctggcatcaagtagtagggggttcgtagatatttatataaataataaaatacaaaaatatggattcttccagaataaagcatattaaccctggaaacatgaattttgtgattctattttttatttgtcaagcatttagtatttttacaatatcatggtatgatattgaggaggtaaaattaaaatatcctgagatgtattctctcttttatcagtgtaggtgataatgtacttaaaggtaagtaatttgtaatgcattcttagaaaggcagtgaccacaaatgtattaaaatatattttaagaaaaaattggattgcataaactaatatggttataagtgactccaaatctaaaatgataaccttgttaggtttaaatctgtatcatctaacagaaatttgagggccagtcaatagtcactgactatgaatttaaaatattcttttaaaataaacatagatgcttatgtgagctcagttgatagaaatgtagtcagatgaggcggaggccataagttaggtttccacacggtctaaattgatgtttgccccaggtacaaagggcacattatccaaatatttgaagcattctctaaggaaggttcagagaggcaatgtgggcttatccatgaagacccatcactgttattagagtggaagtaaggactgcaaacttcatgctcataaatgattgtgtcattttcatactagaattttaccacacacacactcacactcacacacacacacacacacactttgtatggtgatttgcctcccccctttatttttgcagactatgcttaaagatattaaacaaacaactagttttgctattaacatttggttgaaaatttagctttcaattaggtgacaaactgattaatgatttttttatgtagcaaatggccagccacagatttttggtaaataatttggttaccacattacatcttgaaggactaaattatttcactaattgtgagcagggatttttaaaaatttgctctgaagaggacatattgtggatgttgtattggagggcatctgtgtactaattgaagatggtccttcatattacacatcacaaattagctaatttattctttacagaagtattatgacatcttcctttagaactgtgtagagttagattaccacttgagaggcaaggtcatattaaaatagatattataaaattgtataaaaatattttatatgaggatttatgagagcatccagagaatgtgggtagaatacttttgtggaatatgagataacaattttggtgtcctgccattctaaaaaatgaaatttcttcattgaaggtatcacttaccctttcctctgccttgctggaaggaaatggctttaggcaaaagaaaaagccatcagctcttggcagctaaaggtggaatgaagtttggaggaatgaaacccttctgggtggtgaggaaaaatgccaggccatgataaagtggggaaggaagaggggaatgccttgaacagtgccagtaagcataatctgccacagacaagtttgaattgacatatgtagaactgaattattctatatctttttagttctatagagaaaaccgttctttccacgtctctttttaaaataacaacttactgtaagcaaaaaatatgttgttgttgtttctttaacacaggagatgaactatctttagattttttaaagtgatataacatggagccaaaaatgccatatattactgttgaaacctaacgttactttaactgtaatttccttgctattcattttatgatttcctcttgttatgtcaagtgttagagagactgctattactgatcataaatttctttaaaatgtctccttggattttttacaaagctttctgaatcatttatcaaaatacaataaagctctaattgcacctaggattgttcacttggaaatttagaaagagtgtgtacatttacaattaagttagcatcctgccctgcaatgaatgccctttttctttttttttttccttcttctctcctacatctcatcttccaaatgtttgatatgtacgccagtaaggcaaattttactccacttttaggtcaaactattagtacaaataattggaaaattgagcctctaaagaaagataaataagattagaagcatgcattaaaatataagtattaaaaacattcccataagatttttaataaaaattttatgtgctatatgcacacctagactccctgtattatctgatttttaaagattcttttttttttttattttttatttttttgagacggagtctcgctctgtcgcccaggctggagtgcagtggcgcgatcttggctcactgcaagctccgcgtcctgggttcacaccattctcctgcctcagcctccgagtagctgggactacaggcgcctaccaccgtgcccggctaatgtttttgtatttttagtagagacggagtttcaccatgttagccaggatggtctc

SEQ ID NO: 87 - DNA, 4826 bp, synthetic construct
  source 1..4826: mol_type = other DNA
cctgcaggcagctgcgcgctcgctcgctcactgaggccgcccgggcgtcgggcgacctttggtcgcccggcctcagtgagcgagcgagcgcgcagagagggagtggccaactccatcactaggggttcctgcggccattcggtacaattcacgcgtaatagtaatcaattacggggtcattagttcatagcccatatatggagttccgcgttacataacttacggtaaatggcccgcctggctgaccgcccaacgacccccgcccattgacgtcaataatgacgtatgttcccatagtaacgccaatagggactttccattgacgtcaatgggtggagtatttacggtaaactgcccacttggcagtacatcaagtgtatcatatgccaagtacgccccctattgacgtcaatgacggtaaatggcccgcctggcattatgcccagtacatgaccttatgggactttcctacttggcagtacatctacgtattagtcatcgctattaccatggtgatgcggttttggcagtacatcaatgggcgtggatagcggtttgactcacggggatttccaagtctccaccccattgacgtcaatgggagtttgttttggcaccaaaatcaacgggactttccaaaatgtcgtaacaactccgccccattgacgcaaatgggcggtaggcgtgtacggtgggaggtctatataagcagagctcgtttagtgaaccaccggtgccaccatggtgagcaagggcgaggaggataacatggccatcatcaaggagttcatgcgcttcaaggtgcacatggagggctccgtgaacggccacgagttcgagatcgagggcgagggcgagggccgcccctacgagggcacccagaccgccaagctgaaggtgaccaagggtggccccctgcccttcgcctgggacatcctgtcccctcagttcatgtacggctccaaggcctacgtgaagcaccccgccgacatccccgactacttgaagctgtccttccccgagggcttcaagtgggagcgcgtgatgaacttcgaggacggcggcgtggtgaccgtgacccaggactcctccctgcaggacggcgagttcatctacaaggtgaagctgcgcggcaccaacttcccctccgacggccccgtaatgcagaagaagactatgggctgggaggcctcctccgagcggatgtaccccgaggacggcgccctgaagggcgagatcaagcagaggctgaagctgaaggacggcggccactacgacgctgaggtcaagaccacctacaaggccaagaagcccgtgcagctgcccggcgcctacaacgtcaacatcaagttggacatcacctcccacaacgaggactacaccatcgtggaacagtacgaacgcgccgagggccgccactccaccggcggcatggacgagctgtacaagtaaatcgaattcctgtgccttctagttgccagccatctgttgtttgcccctcccccgtgccttccttgaccctggaaggtgccactcccactgtcctttcctaataaaatgaggaaattgcatcgcattgtctgagtaggtgtcattctattctggggggtggggtggggcaggacagcaagggggaggattgggaagacaatagcaggcatgctggggatgcggtgggctctatggctcgagcggcccaagcttaaaaaaatctcgccaacaagttgacgagataaacacggcattttgccttgttttagtagattctgtaattttcattacagagtactaaaacggccacggcacctcccccgtgggtgtttcgtcctttccacaagatatataaagccaagaaatcgaaatactttcaagttacggtaagcatatgatagtccattttaaaacataattttaaaactgcaaactacccaagaaattattactttctacgtcacgtattttgtactaatatctttgtgtttacagtcaaattaattctaattatctctctaacagccttgtatcgtatatgcaaatatgaaggaatcatgggaaataggccctcttcctgcccgaccttgcggccgcaggaacccctagtgatggagttggccactccctctctgcgcgctcgctcgctcactgaggccgggcgaccaaaggtcgcccgacgcccgggctttgcccgggcggcctcagtgagcgagcgagcgcgcagctgcctgcaggggcgcctgatgcggtattttctccttacgcatctgtgcggtatttcacaccgcatacgtcaaagcaaccatagtacgcgccctgtagcggcgcattaagcgcggcgggtgtggtggttacgcgcagcgtgaccgctacacttgccagcgccttagcgcccgctcctttcgctttcttcccttcctttctcgccacgttcgccggctttccccgtcaagctctaaatcgggggctccctttagggttccgatttagtgctttacggcacctcgaccccaaaaaacttgatttgggtgatggttcacgtagtgggccatcgccctgatagacggtttttcgccctttgacgttggagtccacgttctttaatagtggactcttgttccaaactggaacaacactcaactctatctcgggctattcttttgatttataagggattttgccgatttcggtctattggttaaaaaatgagctgatttaacaaaaatttaacgcgaattttaacaaaatattaacgtttacaattttatggtgcactctcagtacaatctgctctgatgccgcatagttaagccagccccgacacccgccaacacccgctgacgcgccctgacgggcttgtctgctcccggcatccgcttacagacaagctgtgaccgtctccgggagctgcatgtgtcagaggttttcaccgtcatcaccgaaacgcgcgagacgaaagggcctcgtgatacgcctatttttataggttaatgtcatgataataatggtttcttagacgtcaggtggcacttttcggggaaatgtgcgcggaacccctatttgtttatttttctaaatacattcaaatatgtatccgctcatgagacaataaccctgataaatgcttcaataatattgaaaaaggaagagtatgagtattcaacatttccgtgtcgcccttattcccttttttgcggcattttgccttcctgtttttgctcacccagaaacgctggtgaaagtaaaagatgctgaagatcagttgggtgcacgagtgggttacatcgaactggatctcaacagcggtaagatccttgagagttttcgccccgaagaacgttttccaatgatgagcacttttaaagttctgctatgtggcgcggtattatcccgtattgacgccgggcaagagcaactcggtcgccgcatacactattctcagaatgacttggttgagtactcaccagtcacagaaaagcatcttacggatggcatgacagtaagagaattatgcagtgctgccataaccatgagtgataacactgcggccaacttacttctgacaacgatcggaggaccgaaggagctaaccgcttttttgcacaacatgggggatcatgtaactcgccttgatcgttgggaaccggagctgaatgaagccataccaaacgacgagcgtgacaccacgatgcctgtagcaatggcaacaacgttgcgcaaactattaactggcgaactacttactctagcttcccggcaacaattaatagactggatggaggcggataaagttgcaggaccacttctgcgctcggcccttccggctggctggtttattgctgataaatctggagccggtgagcgtgggtctcgcggtatcattgcagcactggggccagatggtaagccctcccgtatcgtagttatctacacgacggggagtcaggcaactatggatgaacgaaatagacagatcgctgagataggtgcctcactgattaagcattggtaactgtcagaccaagtttactcatatatactttagattgatttaaaacttcatttttaatttaaaaggatctaggtgaagatcctttttgataatctcatgaccaaaatcccttaacgtgagttttcgttccactgagcgtcagaccccgtagaaaagatcaaaggatcttcttgagatcctttttttctgcgcgtaatctgctgcttgcaaacaaaaaaaccaccgctaccagcggtggtttgtttgccggatcaagagctaccaactctttttccgaaggtaactggcttcagcagagcgcagataccaaatactgttcttctagtgtagccgtagttaggccaccacttcaagaactctgtagcaccgcctacatacctcgctctgctaatcctgttaccagtggctgctgccagtggcgataagtcgtgtcttaccgggttggactcaagacgatagttaccggataaggcgcagcggtcgggctgaacggggggttcgtgcacacagcccagcttggagcgaacgacctacaccgaactgagatacctacagcgtgagctatgagaaagcgccacgcttcccgaagggagaaaggcggacaggtatccggtaagcggcagggtcggaacaggagagcgcacgagggagcttccagggggaaacgcctggtatctttatagtcctgtcgggtttcgccacctctgacttgagcgtcgatttttgtgatgctcgtcaggggggcggagcctatggaaaaacgccagcaacgcggcctttttacggttcctggccttttgctggccttttgctcacatgt

SEQ ID NO: 88 - DNA, 4826 bp, synthetic construct
  source 1..4826: mol_type = other DNA
cctgcaggcagctgcgcgctcgctcgctcactgaggccgcccgggcgtcgggcgacctttggtcgcccggcctcagtgagcgagcgagcgcgcagagagggagtggccaactccatcactaggggttcctgcggccattcggtacaattcacgcgtaatagtaatcaattacggggtcattagttcatagcccatatatggagttccgcgttacataacttacggtaaatggcccgcctggctgaccgcccaacgacccccgcccattgacgtcaataatgacgtatgttcccatagtaacgccaatagggactttccattgacgtcaatgggtggagtatttacggtaaactgcccacttggcagtacatcaagtgtatcatatgccaagtacgccccctattgacgtcaatgacggtaaatggcccgcctggcattatgcccagtacatgaccttatgggactttcctacttggcagtacatctacgtattagtcatcgctattaccatggtgatgcggttttggcagtacatcaatgggcgtggatagcggtttgactcacggggatttccaagtctccaccccattgacgtcaatgggagtttgttttggcaccaaaatcaacgggactttccaaaatgtcgtaacaactccgccccattgacgcaaatgggcggtaggcgtgtacggtgggaggtctatataagcagagctcgtttagtgaaccaccggtgccaccatggtgagcaagggcgaggaggataacatggccatcatcaaggagttcatgcgcttcaaggtgcacatggagggctccgtgaacggccacgagttcgagatcgagggcgagggcgagggccgcccctacgagggcacccagaccgccaagctgaaggtgaccaagggtggccccctgcccttcgcctgggacatcctgtcccctcagttcatgtacggctccaaggcctacgtgaagcaccccgccgacatccccgactacttgaagctgtccttccccgagggcttcaagtgggagcgcgtgatgaacttcgaggacggcggcgtggtgaccgtgacccaggactcctccctgcaggacggcgagttcatctacaaggtgaagctgcgcggcaccaacttcccctccgacggccccgtaatgcagaagaagactatgggctgggaggcctcctccgagcggatgtaccccgaggacggcgccctgaagggcgagatcaagcagaggctgaagctgaaggacggcggccactacgacgctgaggtcaagaccacctacaaggccaagaagcccgtgcagctgcccggcgcctacaacgtcaacatcaagttggacatcacctcccacaacgaggactacaccatcgtggaacagtacgaacgcgccgagggccgccactccaccggcggcatggacgagctgtacaagtaaatcgaattcctgtgccttctagttgccagccatctgttgtttgcccctcccccgtgccttccttgaccctggaaggtgccactcccactgtcctttcctaataaaatgaggaaattgcatcgcattgtctgagtaggtgtcattctattctggggggtggggtggggcaggacagcaagggggaggattgggaagacaatagcaggcatgctggggatgcggtgggctctatggctcgagcggcccaagcttaaaaaaatctcgccaacaagttgacgagataaacacggcattttgccttgttttagtagattctgtaattttcattacagagtactaaaaccgccagggccacggcacctccggtgtttcgtcctttccacaagatatataaagccaagaaatcgaaatactttcaagttacggtaagcatatgatagtccattttaaaacataattttaaaactgcaaactacccaagaaattattactttctacgtcacgtattttgtactaatatctttgtgtttacagtcaaattaattctaattatctctctaacagccttgtatcgtatatgcaaatatgaaggaatcatgggaaataggccctcttcctgcccgaccttgcggccgcaggaacccctagtgatggagttggccactccctctctgcgcgctcgctcgctcactgaggccgggcgaccaaaggtcgcccgacgcccgggctttgcccgggcggcctcagtgagcgagcgagcgcgcagctgcctgcaggggcgcctgatgcggtattttctccttacgcatctgtgcggtatttcacaccgcatacgtcaaagcaaccatagtacgcgccctgtagcggcgcattaagcgcggcgggtgtggtggttacgcgcagcgtgaccgctacacttgccagcgccttagcgcccgctcctttcgctttcttcccttcctttctcgccacgttcgccggctttccccgtcaagctctaaatcgggggctccctttagggttccgatttagtgctttacggcacctcgaccccaaaaaacttgatttgggtgatggttcacgtagtgggccatcgccctgatagacggtttttcgccctttgacgttggagtccacgttctttaatagtggactcttgttccaaactggaacaacactcaactctatctcgggctattcttttgatttataagggattttgccgatttcggtctattggttaaaaaatgagctgatttaacaaaaatttaacgcgaattttaacaaaatattaacgtttacaattttatggtgcactctcagtacaatctgctctgatgccgcatagttaagccagccccgacacccgccaacacccgctgacgcgccctgacgggcttgtctgctcccggcatccgcttacagacaagctgtgaccgtctccgggagctgcatgtgtcagaggttttcaccgtcatcaccgaaacgcgcgagacgaaagggcctcgtgatacgcctatttttataggttaatgtcatgataataatggtttcttagacgtcaggtggcacttttcggggaaatgtgcgcggaacccctatttgtttatttttctaaatacattcaaatatgtatccgctcatgagacaataaccctgataaatgcttcaataatattgaaaaaggaagagtatgagtattcaacatttccgtgtcgcccttattcccttttttgcggcattttgccttcctgtttttgctcacccagaaacgctggtgaaagtaaaagatgctgaagatcagttgggtgcacgagtgggttacatcgaactggatctcaacagcggtaagatccttgagagttttcgccccgaagaacgttttccaatgatgagcacttttaaagttctgctatgtggcgcggtattatcccgtattgacgccgggcaagagcaactcggtcgccgcatacactattctcagaatgacttggttgagtactcaccagtcacagaaaagcatcttacggatggcatgacagtaagagaattatgcagtgctgccataaccatgagtgataacactgcggccaacttacttctgacaacgatcggaggaccgaaggagctaaccgcttttttgcacaacatgggggatcatgtaactcgccttgatcgttgggaaccggagctgaatgaagccataccaaacgacgagcgtgacaccacgatgcctgtagcaatggcaacaacgttgcgcaaactattaactggcgaactacttactctagcttcccggcaacaattaatagactggatggaggcggataaagttgcaggaccacttctgcgctcggcccttccggctggctggtttattgctgataaatctggagccggtgagcgtgggtctcgcggtatcattgcagcactggggccagatggtaagccctcccgtatcgtagttatctacacgacggggagtcaggcaactatggatgaacgaaatagacagatcgctgagataggtgcctcactgattaagcattggtaactgtcagaccaagtttactcatatatactttagattgatttaaaacttcatttttaatttaaaaggatctaggtgaagatcctttttgataatctcatgaccaaaatcccttaacgtgagttttcgttccactgagcgtcagaccccgtagaaaagatcaaaggatcttcttgagatcctttttttctgcgcgtaatctgctgcttgcaaacaaaaaaaccaccgctaccagcggtggtttgtttgccggatcaagagctaccaactctttttccgaaggtaactggcttcagcagagcgcagataccaaatactgttcttctagtgtagccgtagttaggccaccacttcaagaactctgtagcaccgcctacatacctcgctctgctaatcctgttaccagtggctgctgccagtggcgataagtcgtgtcttaccgggttggactcaagacgatagttaccggataaggcgcagcggtcgggctgaacggggggttcgtgcacacagcccagcttggagcgaacgacctacaccgaactgagatacctacagcgtgagctatgagaaagcgccacgcttcccgaagggagaaaggcggacaggtatccggtaagcggcagggtcggaacaggagagcgcacgagggagcttccagggggaaacgcctggtatctttatagtcctgtcgggtttcgccacctctgacttgagcgtcgatttttgtgatgctcgtcaggggggcggagcctatggaaaaacgccagcaacgcggcctttttacggttcctggccttttgctggccttttgctcacatgt

SEQ ID NO: 89 - DNA, 4824 bp, synthetic construct
  source 1..4824: mol_type = other DNA
cctgcaggcagctgcgcgctcgctcgctcactgaggccgcccgggcgtcgggcgacctttggtcgcccggcctcagtgagcgagcgagcgcgcagagagggagtggccaactccatcactaggggttcctgcggcctctagactcgaggcgttgacattgattattgactagttattaatagtaatcaattacggggtcattagttcatagcccatatatggagttccgcgttacataacttacggtaaatggcccgcctggctgaccgcccaacgacccccgcccattgacgtcaataatgacgtatgttcccatagtaacgccaatagggactttccattgacgtcaatgggtggagtatttacggtaaactgcccacttggcagtacatcaagtgtatcatatgccaagtacgccccctattgacgtcaatgacggtaaatggcccgcctggcattatgcccagtacatgaccttatgggactttcctacttggcagtacatctacgtattagtcatcgctattaccatggtgatgcggttttggcagtacatcaatgggcgtggatagcggtttgactcacggggatttccaagtctccaccccattgacgtcaatgggagtttgttttggcaccaaaatcaacgggactttccaaaatgtcgtaacaactccgccccattgacgcaaatgggcggtaggcgtgtacggtgggaggtctatataagcagagctctctggctaactaccggtgccaccatggtgagcaagggcgaggaggataacatggccatcatcaaggagttcatgcgcttcaaggtgcacatggagggctccgtgaacggccacgagttcgagatcgagggcgagggcgagggccgcccctacgagggcacccagaccgccaagctgaaggtgaccaagggtggccccctgcccttcgcctgggacatcctgtcccctcagttcatgtacggctccaaggcctacgtgaagcaccccgccgacatccccgactacttgaagctgtccttccccgagggcttcaagtgggagcgcgtgatgaacttcgaggacggcggcgtggtgaccgtgacccaggactcctccctgcaggacggcgagttcatctacaaggtgaagctgcgcggcaccaacttcccctccgacggccccgtaatgcagaagaagaccatgggctgggaggcctcctccgagcggatgtaccccgaggacggcgccctgaagggcgagatcaagcagaggctgaagctgaaggacggcggccactacgacgctgaggtcaagaccacctacaaggccaagaagcccgtgcagctgcccggcgcctacaacgtcaacatcaagttggacatcacctcccacaacgaggactacaccatcgtggaacagtacgaacgcgccgagggccgccactccaccggcggcatggacgagctgtacaagtaagaattcctagagctcgctgatcagcctcgactgtgccttctagttgccagccatctgttgtttgcccctcccccgtgccttccttgaccctggaaggtgccactcccactgtcctttcctaataaaatgaggaaattgcatcgcattgtctgagtaggtgtcattctattctggggggtggggtggggcaggacagcaagggggaggattgggaagagaatagcaggcatgctggggaggtacctgagggcctatttcccatgattccttcatatttgcatatacgatacaaggctgttagagagataattggaattaatttgactgtaaacacaaagatattagtacaaaatacgtgacgtagaaagtaataatttcttgggtagtttgcagttttaaaattatgttttaaaatggactatcatatgcttaccgtaacttgaaagtatttcgatttcttggctttatatatcttgtggaaaggacgaaacaccttccacgggtcacgaagaaaagtttaagtactctgtgctggaaacagcacagaatctacttaaacaaggcaaaatgccgtgtttatctcgtcaacttgttggcgagatttttgcggccgcaggaacccctagtgatggagttggccactccctctctgcgcgctcgctcgctcactgaggccgggcgaccaaaggtcgcccgacgcccgggctttgcccgggcggcctcagtgagcgagcgagcgcgcagctgcctgcaggggcgcctgatgcggtattttctccttacgcatctgtgcggtatttcacaccgcatacgtcaaagcaaccatagtacgcgccctgtagcggcgcattaagcgcggcgggtgtggtggttacgcgcagcgtgaccgctacacttgccagcgccttagcgcccgctcctttcgctttcttcccttcctttctcgccacgttcgccggctttccccgtcaagctctaaatcgggggctccctttagggttccgatttagtgctttacggcacctcgaccccaaaaaacttgatttgggtgatggttcacgtagtgggccatcgccctgatagacggtttttcgccctttgacgttggagtccacgttctttaatagtggactcttgttccaaactggaacaacactcaactctatctcgggctattcttttgatttataagggattttgccgatttcggtctattggttaaaaaatgagctgatttaacaaaaatttaacgcgaattttaacaaaatattaacgtttacaattttatggtgcactctcagtacaatctgctctgatgccgcatagttaagccagccccgacacccgccaacacccgctgacgcgccctgacgggcttgtctgctcccggcatccgcttacagacaagctgtgaccgtctccgggagctgcatgtgtcagaggttttcaccgtcatcaccgaaacgcgcgagacgaaagggcctcgtgatacgcctatttttataggttaatgtcatgataataatggtttcttagacgtcaggtggcacttttcggggaaatgtgcgcggaacccctatttgtttatttttctaaatacattcaaatatgtatccgctcatgagacaataaccctgataaatgcttcaataatattgaaaaaggaagagtatgagtattcaacatttccgtgtcgcccttattcccttttttgcggcattttgccttcctgtttttgctcacccagaaacgctggtgaaagtaaaagatgctgaagatcagttgggtgcacgagtgggttacatcgaactggatctcaacagcggtaagatccttgagagttttcgccccgaagaacgttttccaatgatgagcacttttaaagttctgctatgtggcgcggtattatcccgtattgacgccgggcaagagcaactcggtcgccgcatacactattctcagaatgacttggttgagtactcaccagtcacagaaaagcatcttacggatggcatgacagtaagagaattatgcagtgctgccataaccatgagtgataacactgcggccaacttacttctgacaacgatcggaggaccgaaggagctaaccgcttttttgcacaacatgggggatcatgtaactcgccttgatcgttgggaaccggagctgaatgaagccataccaaacgacgagcgtgacaccacgatgcctgtagcaatggcaacaacgttgcgcaaactattaactggcgaactacttactctagcttcccggcaacaattaatagactggatggaggcggataaagttgcaggaccacttctgcgctcggcccttccggctggctggtttattgctgataaatctggagccggtgagcgtggaagccgcggtatcattgcagcactggggccagatggtaagccctcccgtatcgtagttatctacacgacggggagtcaggcaactatggatgaacgaaatagacagatcgctgagataggtgcctcactgattaagcattggtaactgtcagaccaagtttactcatatatactttagattgatttaaaacttcatttttaatttaaaaggatctaggtgaagatcctttttgataatctcatgaccaaaatcccttaacgtgagttttcgttccactgagcgtcagaccccgtagaaaagatcaaaggatcttcttgagatcctttttttctgcgcgtaatctgctgcttgcaaacaaaaaaaccaccgctaccagcggtggtttgtttgccggatcaagagctaccaactctttttccgaaggtaactggcttcagcagagcgcagataccaaatactgttcttctagtgtagccgtagttaggccaccacttcaagaactctgtagcaccgcctacatacctcgctctgctaatcctgttaccagtggctgctgccagtggcgataagtcgtgtcttaccgggttggactcaagacgatagttaccggataaggcgcagcggtcgggctgaacggggggttcgtgcacacagcccagcttggagcgaacgacctacaccgaactgagatacctacagcgtgagctatgagaaagcgccacgcttcccgaagggagaaaggcggacaggtatccggtaagcggcagggtcggaacaggagagcgcacgagggagcttccagggggaaacgcctggtatctttatagtcctgtcgggtttcgccacctctgacttgagcgtcgatttttgtgatgctcgtcaggggggcggagcctatggaaaaacgccagcaacgcggcctttttacggttcctggccttttgctggccttttgctcacatgt

SEQ ID NO: 90 - DNA, 4824 bp, synthetic construct; identical to SEQ ID NO: 12
  source 1..4824: mol_type = other DNA

SEQ ID NO: 91 - DNA, 7089 bp, synthetic construct; identical to SEQ ID NO: 5
  source 1..7089: mol_type = other DNA

SEQ ID NO: 92 - DNA, 4824 bp, synthetic construct
  source 1..4824: mol_type = other DNA
cctgcaggcagctgcgcgctcgctcgctcactgaggccgcccgggcgtcgggcgacctttggtcgcccggcctcagtgagcgagcgagcgcgcagagagggagtggccaactccatcactaggggttcctgcggcctctagactcgaggcgttgacattgattattgactagttattaatagtaatcaattacggggtcattagttcatagcccatatatggagttccgcgttacataacttacggtaaatggcccgcctggctgaccgcccaacgacccccgcccattgacgtcaataatgacgtatgttcccatagtaacgccaatagggactttccattgacgtcaatgggtggagtatttacggtaaactgcccacttggcagtacatcaagtgtatcatatgccaagtacgccccctattgacgtcaatgacggtaaatggcccgcctggcattatgcccagtacatgaccttatgggactttcctacttggcagtacatctacgtattagtcatcgctattaccatggtgatgcggttttggcagtacatcaatgggcgtggatagcggtttgactcacggggatttccaagtctccaccccattgacgtcaatgggagtttgttttggcaccaaaatcaacgggactttccaaaatgtcgtaacaactccgccccattgacgcaaatgggcggtaggcgtgtacggtgggaggtctatataagcagagctctctggctaactaccggtgccaccatggtgagcaagggcgaggaggataacatggccatcatcaaggagttcatgcgcttcaaggtgcacatggagggctccgtgaacggccacgagttcgagatcgagggcgagggcgagggccgcccctacgagggcacccagaccgccaagctgaaggtgaccaagggtggccccctgcccttcgcctgggacatcctgtcccctcagttcatgtacggctccaaggcctacgtgaagcaccccgccgacatccccgactacttgaagctgtccttccccgagggcttcaagtgggagcgcgtgatgaacttcgaggacggcggcgtggtgaccgtgacccaggactcctccctgcaggacggcgagttcatctacaaggtgaagctgcgcggcaccaacttcccctccgacggccccgtaatgcagaagaagaccatgggctgggaggcctcctccgagcggatgtaccccgaggacggcgccctgaagggcgagatcaagcagaggctgaagctgaaggacggcggccactacgacgctgaggtcaagaccacctacaaggccaagaagcccgtgcagctgcccggcgcctacaacgtcaacatcaagttggacatcacctcccacaacgaggactacaccatcgtggaacagtacgaacgcgccgagggccgccactccaccggcggcatggacgagctgtacaagtaagaattcctagagctcgctgatcagcctcgactgtgccttctagttgccagccatctgttgtttgcccctcccccgtgccttccttgaccctggaaggtgccactcccactgtcctttcctaataaaatgaggaaattgcatcgcattgtctgagtaggtgtcattctattctggggggtggggtggggcaggacagcaagggggaggattgggaagagaatagcaggcatgctggggaggtacctgagggcctatttcccatgattccttcatatttgcatatacgatacaaggctgttagagagataattggaattaatttgactgtaaacacaaagatattagtacaaaatacgtgacgtagaaagtaataatttcttgggtagtttgcagttttaaaattatgttttaaaatggactatcatatgcttaccgtaacttgaaagtatttcgatttcttggctttatatatcttgtggaaaggacgaaacacccgctgatgtcggccgtctgccgtttaagtactctgtgctggaaacagcacagaatctacttaaacaaggcaaaatgccgtgtttatctcgtcaacttgttggcgagatttttgcggccgcaggaacccctagtgatggagttggccactccctctctgcgcgctcgctcgctcactgaggccgggcgaccaaaggtcgcccgacgcccgggctttgcccgggcggcctcagtgagcgagcgagcgcgcagctgcctgcaggggcgcctgatgcggtattttctccttacgcatctgtgcggtatttcacaccgcatacgtcaaagcaaccatagtacgcgccctgtagcggcgcattaagcgcggcgggtgtggtggttacgcgcagcgtgaccgctacacttgccagcgccttagcgcccgctcctttcgctttcttcccttcctttctcgccacgttcgccggctttccccgtcaagctctaaatcgggggctccctttagggttccgatttagtgctttacggcacctcgaccccaaaaaacttgatttgggtgatggttcacgtagtgggccatcgccctgatagacggtttttcgccctttgacgttggagtccacgttctttaatagtggactcttgttccaaactggaacaacactcaactctatctcgggctattcttttgatttataagggattttgccgatttcggtctattggttaaaaaatgagctgatttaacaaaaatttaacgcgaattttaacaaaatattaacgtttacaattttatggtgcactctcagtacaatctgctctgatgccgcatagttaagccagccccgacacccgccaacacccgctgacgcgccctgacgggcttgtctgctcccggcatccgcttacagacaagctgtgaccgtctccgggagctgcatgtgtcagaggttttcaccgtcatcaccgaaacgcgcgagacgaaagggcctcgtgatacgcctatttttataggttaatgtcatgataataatggtttcttagacgtcaggtggcacttttcggggaaatgtgcgcggaacccctatttgtttatttttctaaatacattcaaatatgtatccgctcatgagacaataaccctgataaatgcttcaataatattgaaaaaggaagagtatgagtattcaacatttccgtgtcgcccttattcccttttttgcggcattttgccttcctgtttttgctcacccagaaacgctggtgaaagtaaaagatgctgaagatcagttgggtgcacgagtgggttacatcgaactggatctcaacagcggtaagatccttgagagttttcgccccgaagaacgttttccaatgatgagcacttttaaagttctgctatgtggcgcggtattatcccgtattgacgccgggcaagagcaactcggtcgccgcatacactattctcagaatgacttggttgagtactcaccagtcacagaaaagcatcttacggatggcatgacagtaagagaattatgcagtgctgccataaccatgagtgataacactgcggccaacttacttctgacaacgatcggaggaccgaaggagctaaccgcttttttgcacaacatgggggatcatgtaactcgccttgatcgttgggaaccggagctgaatgaagccataccaaacgacgagcgtgacaccacgatgcctgtagcaatggcaacaacgttgcgcaaactattaactggcgaactacttactctagcttcccggcaacaattaatagactggatggaggcggataaagttgcaggaccacttctgcgctcggcccttccggctggctggtttattgctgataaatctggagccggtgagcgtggaagccgcggtatcattgcagcactggggccagatggtaagccctcccgtatcgtagttatctacacgacggggagtcaggcaactatggatgaacgaaatagacagatcgctgagataggtgcctcactgattaagcattggtaactgtcagaccaagtttactcatatatactttagattgatttaaaacttcatttttaatttaaaaggatctaggtgaagatcctttttgataatctcatgaccaaaatcccttaacgtgagttttcgttccactgagcgtcagaccccgtagaaaagatcaaaggatcttcttgagatcctttttttctgcgcgtaatctgctgcttgcaaacaaaaaaaccaccgctaccagcggtggtttgtttgccggatcaagagctaccaactctttttccgaaggtaactggcttcagcagagcgcagataccaaatactgttcttctagtgtagccgtagttaggccaccacttcaagaactctgtagcaccgcctacatacctcgctctgctaatcctgttaccagtggctgctgccagtggcgataagtcgtgtcttaccgggttggactcaagacgatagttaccggataaggcgcagcggtcgggctgaacggggggttcgtgcacacagcccagcttggagcgaacgacctacaccgaactgagatacctacagcgtgagctatgagaaagcgccacgcttcccgaagggagaaaggcggacaggtatccggtaagcggcagggtcggaacaggagagcgcacgagggagcttccagggggaaacgcctggtatctttatagtcctgtcgggtttcgccacctctgacttgagcgtcgatttttgtgatgctcgtcaggggggcggagcctatggaaaaacgccagcaacgcggcctttttacggttcctggccttttgctggccttttgctcacatgt

SEQ ID NO: 93 - DNA, 7419 bp, synthetic construct; identical to SEQ ID NO: 11
  source 1..7419: mol_type = other DNA

SEQ ID NO: 94 - DNA, 7518 bp, synthetic construct; identical to SEQ ID NO: 14
  source 1..7518: mol_type = other DNA

SEQ ID NO: 95 - DNA, 4824 bp, synthetic construct; identical to SEQ ID NO: 12
  source 1..4824: mol_type = other DNA

SEQ ID NO: 96 - DNA, 5316 bp, synthetic construct; identical to SEQ ID NO: 13
  source 1..5316: mol_type = other DNA

SEQ ID NO: 97 - DNA, 32767 bp, synthetic construct
  source 1..32767: mol_type = other DNA
agtgggtacctgtaatcgcagctacttgagaggttgaggcagagaattgcttgaacctgggaggtggaggttgtagtgagccaagatcgcaccattgcactccagcctgggtgacagagcgagactctgtctcaaaaaaaaaaaaaaaaaaaaaattcctttgatcaacatctcttcaacaccttgcccttctaactatcctggacatatttttaaaaccccaccctctctcagtgccaaattgtgacttgtgacctctgagttagcccgacaggccaccccctctcactgccaaactgtgacttgtgacctctgagttagcctgacaggccaccccctctcactgccaaactgtgacttgtgacctctgagttaacccgacaggccaccccctctcactgccaaactgtgacttgtgacctctgagttagcccgacaggcctaagctctgctctcttcggaccccagttctcaacatcagcacctcggttcagctggcagcctccatgccttcaggattccagcctgcacagactccagaccctacggccccagtcgcctacttcccatacttcaacaggacctacctgggggtggccgcgtcactcaacgggggcaatgtgctggccacgttcgtccacatgctggttcagtggatggcagatctaggtaaggtgtggcccacacagcgctgtgttctctgcctgtcctttctacccggcagggtctcggagcttcacggagcttcatgtgcggtttcagcgtccacattgaggtctcagaccctgccaggtcctggcatatttctcccatcctttgggatctgagcttgcagcctcttttcttcttgtcctccaagctgccatcacctactcttttctttgggtcaggcacccttcccccaaccttgactgtgaaccttcctaacagtctccccagctttcccccgccctccctgctccctcttttctcctcctgctcctttctcttatccttggggtagaatttatgaagttttctctgctctccatggacagttgctccttgacttacaatggtgcgtatttcacttacaatgcacttatatcctgagaagcctggccataggaagtgcgatgcaggcttttcttcttcttcttcttctttttttttttttttgagacggagtctcgctctgtcacccaggctggagtgcagtggcgcgatctcggctcactgcaaactccgcctcccaggttcaagggattctcctgcctcagccttccgagtagctgggattacaggcatgcgccaccacgcctggcaaatttttgtctttttactagagatggggttttgccatgttggccaggctggtcttgaactcctgacctcaggtgatccacccgcctcggcctcccaaagtgctgggattataggcatgagccactgtgcctggcctgatgtaggcatttcttttcttttcttttcttttcttttttgagatggagtctcgctctgttgcccaggctggagtgcagtagtgcgatctcggctcactgcaatctccgcctcccaggttcacgccattctcctgcctcagcctcccaagtagctgggactacaggcacccgccaccacacccagctaatttttttgtatttttagtagaggtggggtttcaccgtgttagccaggatggtctcaatctcctgaccttgtgatccacctgcctcggcctccaaaagtgctgggattacaggcgtgagccactgcgctcgccctgatgtaggcatttcttaaagaagcacggtgcggggtggaacccaggagagtgactttggttcccagctgtgtccctgagtcattatttggccttggcaagtcccttcccttctttgttttcccatctccagtgtcttgtggtcttaagtccttgggttagaattaactcaacagctcatagcagctttcgcctccattcgtcctcactaaatagactgggggagctgaggacgcaggcactctgctagaggccaggcctctcttccaggcctccagctggtatgcaccttccttcaggtaccccagagcttgggtcatggcccaagtatttcccagagaggaggaagagtatgttttaaccttcccttccaaccttttttggcgctgtgcatggtggcacgtggctgtaatcccagctactcaggaggccgaggcgggaggattgcttgagctcagagttgttcaagtccagcttgggcaacatagcaagaccctgtctgtaaaaaaaaaagaaaactttttttcctgaacttttactaaagaaagataagcacatgatttaaaaaataaaatagccaggcgcggtggctcatgcctgtaatcccagcactttgggaggctgaggcgggcggatcacctgaggtcaggagttcgagaccagcctggccaatatagtgaaaccctgtctctactaaaaatacaaaagttagccaggtgtggtggcacacgcttgtaattccagctactcgggaggctgaggcaggagagtcacttgaacccgagatgcagaggttgcagtgagctgaaataataccactgcacctgtgcatttgcagaggttaaacattcccatggcgtgactcctcagtgactctctagattggtgggtcttggcactgaccacaccctggaaatactgtggagtttaaaaacatcgttgcatcctggtcccacgcccagaaatgctgatttattggacctggggtgtgggccttgagcatgagttttataaaagttcctcaggtgattctgaggcctgaagtgttaataagcactgctctagaactgtctcctcagaaagcctggtctactggcctggagtacagtttcctctgggagcttttaacaaatgcagaatgttagggtcagccctaggcaatctgagtccaagctatgtgttaaaaagatccctggctgggcgtggtggctcacacctgtaatcccagcactttgggaggccgaggtgggcggatcacgaagtcaggagttccagaccagcctggccaatatggtgaaacaccgtctctactaaaaatacaaaaattagcctggagtggtggcatgcacctgtagtcccagctactcgggaggctgaggcagaagaattgcttgaacctgggaggcagaggttgcagtgagccgagatcgcgccactgcactccagcctgtgtgacagagcaagactccgtctcaaaaaaaaaaaaaaaagatccctgagtgactcatctgtatgttcaggttggagaagccctaggctggagaagccctaggtctaggtcgggggctccccagcgtggctgtgtataagaatcaactgcaagtgtttacaaattccagcccgcagcctgcaacccacaccagttaaatcagaaagtctggagatggggcccacagtgctctcaagaaaccctgatgttgataactttcttcttatcaaggtgatgtttgctttccctcaggtcatgcgaggttatagatcaaaagtgattctaaggtcaaagtgtatcgaaaccaaaggctttttttttttttttttaagactgagtctcgcactgtcacccagactggagtgcagtggcaccatctcagctcactgcaagctctgccttctgggttcaagcgtttctcatgcctcagcatcccaagtagctgggactacaggcacacactgccatacctggctaatttttgtatttttagtagagacagggttttaccatgttgtccaggctggtctggaactcctgacttcaagtgatccgcctgtcttgacctcccaaagtgctgggattacagcgtaagccaccgcgcttggcctttttttttttttcgtttgtttgttttaagaatgcagagctggcggggcatggtggctcatgcctgtaaccccagtactttggaaggctgaggcaggtagatcacttgaggtcgagagcttgagaccagcctgtccaatgtagtaaaaccttgtctctactaaaaataccacaattagccaggtgtggtggtgtgggcctgtaatcccagctacctgggaggctgaggcaggagaatcgctggaacccgggaggcagaggttatagtgagccgataggatatgtgccactgcactccagcctgggtgacacagcgagcctcagaaaaaaaaaaaaaaaaaaaaaaacccgcagagctaacgtggtgtcagggagaaaagtccgatcgggattctggcttgacactgaaaagcaagttgtaggatggtcaactcatccttcttccttggatttcaggtgccctgtgcacataacgagggtggcccattcagtgattggtcctggatcctgggatttctgatgctgctaacgaccccaatgacatccatgatgatagttttgtttgtttgtttgttttagatggagtcttgctcttgttgcccaggctggagtgcagtggtgcaagctccgctcactgcaacctctgcctcccaggttcaagtgattctcctgcctcagcctcctgagtagctgggattacaggtgcctgccaccacgcccggttaatttttgtacttttagtagagacagggtttcaccacgttggccaggctggtcttgaactcctgacctcaggtgatctgcccgccttggcctcccaaagtgctgggattacaggcgtgagccaccacgcccagccaatgatagttattagtctgtatatgcatttggtccccttggttaagaagcctgtgttaggggtagggctcatggcagcacttaatgagacctcaccctgatgtctggctggggtctgcactgagacagcgggcggggatccagggcagagtgtagctagcctggctatagcagtccctgagcccagaaccaccagctgcagcgggaggagaagcagcaagtagcgctgttcccaccctgtgggaattctctgccatgtcagcctgcactgagggggacgcatgagcttacacagatcttctctgtctctggcaggcctggaggttgaagaatccactgtgtattcacgcatgattcaggcagctgtgcagcagagagatacccacctgaccatcaccccgacagtgctgggggagaggcacctgccggaccagctggcctcagtgaccagaatctcctcctccgacctctccctggggcacgtgacccgggctctgtgccgaggcattgttcagaacctgcactccatgcttccgattcagcagctccaggagtggggcgtggagagggtgatgggcagtgggagtgcgctgtccaggaatgacgtgctgaagcaggaggtgcagagggctttccctttgcccatgtcctttgggcaggatgtggatgcagctgtcggggcagctctggtcatgctccggagacacctcaaccagaaggaatcttagacagcaaactctttcgccaaacgactgctgtgaattttacctgattaacattcctgacaccatctgtgggtcatcctttccctggaccgttcagtggacagctttcaagcagtgcttgttgtgaggtcccatctcggccaagaacttaccttcagaacatactctaataatgcagccaggagccgtcagccagatcccaaatgagtgccttccgaaattgacccacctgggagctatttacaaatgtccatgtgggagagagagagcatgagagcacagtagcccagcctgctggtcagcaggctcatctgtggttcacctgtagacagagagcagatcaatgtgtacttcagacaccagaaagtctggtggctttggtcccaagtgggaaaagagaactgccccatgcccagcttgtgattatcgtttttggagacctgaagcccacactcgggtcgtatggacttctggaaaagttcttgtctcctggactgaaccatgtgaccggaggcccctttcctagtctcatcctcccctggctgcagatgcttagctgggccagggattgacccaagcgcgatgcagcaggcaggctcagaagacgatgcggggctgtgtgccggccttcttgctgcatgtactcagcctcaggagagcttgctgcacccaggccgcccaggtcttcacagcacaactgcctggaaggcaggttgcgagaaggagaggcggatggcatgagcagcaagggggaccgatgctgtgcagctcacaccactccagaacctgacaaggcaccagcaggaccccttgccaggagcatgtctgtgcagcagtgtttttgcccctgcacattccagaagccctcatgggaagggatgcagccaggcagactcctgccagatggggcaggtagtttattcaaagagaactctgtatcccataggcccaggctctcctttcgcttggcgtgggctttgctggcccagtgtgtgctcctggctcagcagaaacatccatttgagttggcatccctgtagggatcccagagcgttgtaagccttcttgtgattggtagggatggctgtggggtggcttccaggagggggccaccattgccgcatctacttctagactcccaaaggagcccaggctcaggcaggcctggcccagagtcacgctggcaaccacgagtttgggaagcagtcgtattctctctctctctctctctctctctctcagtatccatgacaggtatgaaacatattgtctctttataaatgtcattttacaaattatgtgattatctggaagctctaagatgagagcaaatgcctgatcactctggccaaatgtcagatactaaagcccattcttggccgggcatgttggctcccgcctgtaatcccagcactttgggaagcccaagtgggtgaatcacctgaggtcaggagttcaagaccagcctgaccaacatggggataccccgtctctactaaaaatacaagccgggcgtggtggcgcatgcctgtaatcccagctactcaggaggctgaggcaggaaaatcacttgaactcgggaggcagaggttgcagtgagctgagatcgcgccattgcactccagcctgggtgacagagcaagactctgtctcataaataaatacaaagcccattcttccagagtcttgtgccttaaataaaacacacctctctgctgtgggaagactgtgcaatggcacagccgcagagcttggtttgggaggttgaagtgctctggggagaattcgtagatcatcctcagaaaagccttgccctggtgttctaccagaaaaacgtctcccaatcacccaggaaagctgtccacagtagtccccccttatccacggtgtcactttccatgggttcagttatctgcggtcaaccacggtctgacaatattaaatggaaaattcttcaaacagttcccaagttttcccttgtgcattgttctgagcagtgtgatggagagtctctgccgtgccatctgggatgcaaaccgtccctgtgttccccacgtccaggccgtagatgctccccgccggtcagtcacttagtcgtcagatcgcccgtcctggtatcacagtgcttctgttcaggtcagtctttttttacttcattagggccccaaagcaccagagtagtgatgctggtagtgatgctggctgttcggatatgccaaagagaaaccgtaaggtgcttcctttaagtgaaaagatgggaagaaaacagtcatatgctgaatcttctatctgtgaaattctaaagaaaaagaaattcgtgctagttttttttgcctttttttttttttttttgagacatagtctcactgtgtcacccaggctggagtacagtggtgcaatcttggctcactgcaacctctgcctcccgggttcaagcgattctcttgcctcacccttctgagtagctgagattacaggctcctgccaccacgcctggctaatttagttttagtagagatggagtttcatcatgttggccaggctggtctcgaactcctgacctcaggtgatccacttaccttggcctcccaaagtactaggattgcaggcgggagccactgaccccagcctcatgccagttttgctgtcacacctcaaactgcaaaagtatggtcacagtgtgtgataacttttattagagtgtattgttaaaaccgttctactttggctgggtgtgggggctcacacctgtaatcccagcactttgggaggccgaggcgggtggatcacctgacatcaggagtttgaaaccaacctggccaacgtggtgaaaactcgtctctactagaaatacaaaagttagctgggcatgatggcacgcgcctgtaatcccagctacttaggaggctgaggcaggagaatcgcttgagctctggaagcagaggttgcagtgagctgagatcgcaccactgcactctagcctgggtgacagagcgagactctgcctcaaaaaaaaaaaaaaaattgttctactttattgttgttgttaatctcttactgtgcctaatttgtaaattaaattatattacagatatgtatgtgtagaaaaaacatggcatatgcaggatccaatactagccttggtttcaggcatctatgcagggtcttgggacatatctcctgtggatgacagggggctactgtattttttttttcttttaggcagagtctccctctgtcgcccaggctggagtgcagtggtgcgatctcagcccactgcaacctccacctcccgggttcaagcaattcttgtacctcagcctcccgagtagctgagattacaggcatgtgctaccacacctggctaatttttgtatttttagtagagatggggtttcaccatgttggcctggtcttgaactcctgacctcaggtgatccacctgcctcagcctcccaaagtgctgggattacaggcgttagccaccatgcctggcctgctactgtaatttttctttcagccaaatgagtttaagatgctgtcattgcagccctgaggaaggctgcatgagagagaagagtaggctgagtttaccagcgtcctttgtcttttgggaggagccaggccgtctaatctcagagtggcagcctgtctcgcctgcccagcatgcagtggatggggtctgcaaatgtaaggttaggaacgggatggacatccagcaagctcaggcagcccagccttgtgcctggtgtggccccggaactctctgtcctctttccagactatgcattcactctgcctctgaggactgagccttggagggtcccagtttgtcaataaacagggctgctcctgctgcttccgttgcctgaggcctggagcctccgtctaggtgggggatgagtgcagctgcctgaagtcacaaccacgtgcacaacccaccctccttcccaggaggtgccagtaagtggtttgaggccggcatgcttctgaagaagtggtgagcggggctcctttgctggccgtcagtatcccgatgctatgagcccacggcagggctgcaccttccccccgatccgcttcggccagtgggacgtgcacagggaatgcctgtcactcctgggcagaggtctttaggagccagtgagctacttgccacacacccttccctttgccacaagtgactggcagtgccccagagagtggtagctctgtcagcctgggtccctgagtgaggacagtgtggtgtagagttctcaccaaccagcgagggacgtgcagtgggacagagaagtaagcgccctttggtgcagtgcctcacacctgtaaacccagcacttcgggaggccgaggagggcggatcacttgaggtcaggagttccgagaccggcctggccaacatggtgaaaccccgtctctactaaaaatacaaaaaaattagccgggcatggtggtcggcacctgtaatctcagctacttgggaggctgaggcaggagaatcgcttgagcctggaaggcggaggttgcagtgagctgagatcatgccactgtactccagtctgggagacagagcgagattctgtctttaaaataaataaataaataaataaataataaacctttgatgtttgaagccactgagatttgggggttgtcaccacagcagagcagcctcagtagcctgcacctgggacgtctcccatgcacccagcacagacccaggcagccacattttctgagcgcccagtagtagctgggtgttctctcagagactgccccccgttgaatttccatcacgaggcaatggaaaaataccaacagttggttacataaacagaccctaggaaaagaaaaagacacagacaatgacagcacctctatgcccagagggaggagaaattcattctttacacaagtcacattgagctaaacctccaagggtttccatccatggttactaacgacagttaacatttctttttgagtacctgctgtgtactgggatctgatctaaactctacttgtttgaattcattgaatctttttttttttttaaatggagtctcactctgttacccaggctggagtgcagtggtgcgatctcagcttactacaacctcagcctcccgggttccagcaattctcatgcctcagcctcgcgagtagctgggattacaggtgtacaccacctcacctggctaattttttgtacttttagtagagacggggttttgccatgttgcctaggctggtcttgaacttctggcctcaagtgatccacccacctcggcctcggaaagtgctgggattataggcatgaggcaccatgccaggcctcatttaatctagaaggtgggtagtgttatccccatttcacacatggagagatagataaacaaaaaagttaagtaacttacctgagatcacagtgctaggattcaaaccccagagcgaacccactctctttagcaactaggcagtggggtcaggctaggtaaatgtgtttacattaaagtgatcgtcatgtccagagtgtgacaaattggtgtaacttggtcatagtgtgaatggaaggatgtttataggagttgtggctggacgtgttgggcagactgtgaagggtcttgcatgcccgcctgaggggattggactgtctcctgtagacagtggggtttggaggactggggccttgggagtgtagctgacagtgtggacgctggattggaggaagggtgttctgggagacaggaggctgtaaaacagcctggagagatggtgggccagacccagttcagggcagggtaggggactccagcccaccagccgctgcttttcctcccgccacacactgcctgcctctgggccttgaccccgtccacatcatgtgtatgtggctttcatgttctctacttttctcttcttcttctttttttctttttctttttctttttttttttttgagactttttgagagtcttcctctgttgcccaggctagagtgcagtggtgcgatcttggctcactgcaacctccgcctcctgggtttaagcagttctcctgcctcagcctcctgagtagctgggattacaggtgcctgccaccacacccagctaatttttgtatttttaatagagacggggtttcaccatgttggccaggctggtctcaaactcctgacctcaggtgatccgcccgcctcagcctcccaaagtgctgggattacaggcatgagccaccacgcctggcctatttttctcttcttctgaagtggactgaaagctctttgagagcaggtgcctaggtgtcctcagccctgtcctcctgcaccttagctcatgccaaggcccatgtttggaatgtcctccttgtggggcagaatccttctccttgtccaaggcccagcccaaatggcatctgccctctgcaaagggcctccctggtgacacatacgccatctgattacaactgcaggggaggccaagacccggctcaacatttgttgttggcatggtctgttggccccagagcccctggcctgtgcctgttacagggtgccctgccctgcctagtgtcaagagagagcctgtgcacatcttcctttcctgtccatcgtgggcttcttgagcgcagagaccaccctgttgaccctactgctctgctaggggatttgtatagcacatggtgggccctcaggagagagggtctcacctggcctctcccctcagccacaggtagatggacaggccaagtctttgaaagtgggagagtcctgatacagagatgctcacttgcgtgactcatcaaacattaagcaaaccttgtttttttcattaaaaaacaattagtcataacttcgagctaatggccggatacagctcagcagtcagcagatgtggtcctcaggctgaaataatgaagatgagagcagtcatctctcatgcctgcctagagctttaccaggctcagagcccattcacacccactatcctgactaatcccagaaaagcctcgtaaagcaggtagggcaggtgttcttggctgtaattttgtggaggaagaagtagacccagaggttcagctaccagccggagtccatacagccggcatctagcacacgcgggcctcttccatccaaggtccaggttctacccacctgctgaccctccattggccctcgtccctcttgttcccagtccctgccctggaacacagctctgcagagcggggctccagcgttctgtgctgactgggtgtctgacccctccccagctcagacttcaagctctagccacttctggagggtgctgaccggctcgcagaccgctgccctccacggaagctggtcttttagactcttgggcacccggtgacaggaacacagagacgaaatgcaggaaggagggtatttttctttttttttttaattttaattttaattttttgagatggagttttgctcttgttgcccaggctggagtgcaatggcgtgatctcagctcatgcaacctccacctcctgggttcaagtgattctcctgcctcagcctcccgagtagctgggattacaggcatgcaccaccacgcctggctaattttgtatttttagtagagacggggtttctccatgttggccaggctggtctcgaactcccgacctcaggcgatccacccgcctcggcctcccaaagtgctgggattacgggcgtgagccactgaggccggctggggctcgaatcttgagaggaacccaggtgagtgaagaaaagaaatttgtctccgatggccagtgtcaagagctcagcttaatgtcaagaactcagcttaagtcaatgtgccccctagtggtaacactaagagaaaactgtcaccattagcgacggtggcggtgtttagcatctgccattccagatttggcccagccgctggctggcgcgtccgcagacgctttcctgagctgcctctcgctcccatcaaacctgaacttagaaaaccaccctccctcccagaagtcattaaaacttttctactcacaaggagttttaatgggtacatcattacataaatgcaagaacatcctgtttcaaatgatgacccagaaaaccacactgatggcagtgatggccagccctgaggtcttgtccccgccaccatgtcgagagttttagtggaatcactccgtgaaggtgctgttcagataaagccaaaaaccacgccaacaaacgtttcctgagtgctgctttgagcaaggtgcaagctaggttcagagaggggagggcacgagagccgtatgtatctcaccctggagctgcttaaatctgcaaagcaagacacaagaaaatcatgacgttacatgtctatacaagatttagaaagctccagacgagactagtagagctgtcactgtccttcggcaggtgtgtagcctgtctgtgcttctttccttatcagtaaaacggggacaaaattgtactcacctcatgaactcttactgaggtctgatgagatagtgcatataaagtgctcatgccaacacccaggacgttgtacgcactcaacacatattcacagccattactgttgtcatcattgtggccatgagtactgtgcccgttgccataggaagcgcattggttgaagttcctgtaggagtttagaagtgagcacttctggagttgggcgtggtagctcatgtctgtaatcccagcatattgggagactgaggtgggggatcacgtgaactcaggagtttgagaccagtctggcaagatggcgagactctgttgctaccaaaaaaaaaaaaaaatccgagcgtggtggtgcacacctgtagtcccagttacttgggagggtgaggcaggaggatcctttgagtccaggaggtggaggctgcagtgagctatgattgtgagtcccttgcattgggtgacaatgcaagataccacctctttaaaaaaaaaaggtgagaaatgagctctttatgctggggcctttgggagaaggtgggatttgagcatccctagggctcacctcgcacttgaagatgggttaagtggggtactgggatggaggagggtgggggaaagggtggagtcagcacgtttagtgtggctgggaaggggtgtgcccaggtgacagaaggtgggtttcggtgggagaggagactgggtctgtgggctcagggtgcgggggtggggcgttgctcagcagtggggacccctgagaggcaagggggcctgatcaggatgagcttccaggactgttgatctggaggtgaggggttgtgggaggttggaccagggaaaggaggcacttctggtcattcaggtgagaagaaggggctcccaggtagaggagggatggacggaagccacagaaacagcccagggagggccgagaaggagaggctggaggtcacaaagggcaccgggtttggtggccagaaggaagttgatgcctttccaggcagggactgctgcagggagcgggaggggagtgaatgtggagggaacaggagcccattgtgggttatgctggggggagggggcttgtgggcttcacctgcagattcagggaggcagggatggagctcagggaagagggctgggtggactctggatgaagcagccgctgacttggacacatcagagaggtccttgggaggggccaggcgaaggtctccaaggacagtggtggagctggagaagataaggctgcggacggggtccttggacccccaggtgtggggaacggcaagaagaggagagcagccagggagtcccggcaggagtggccagggcaggaggagggccgggacttcccctgcaggcctctgagcaggcactgtgccctgtagactccggtgatactgttagcaccaagggctctgttaacaaagaggacaggacacatttagtgatgtgtgctgtgttcactggaaatggtgctgtcttttgttttgtttcgttttgttttttttaaatggagtctcgctctgtagcccgggctggagtacagtggtgtgatctcagctcactgcaacctctgcctcccaggttcaagtgattctcgtgcctcagcctccagagtagctgggactacaggcgtgcaccaccacgcccagctaattttttgtatttttagtagagacaaggttccactatgttggctaggctggtcttgaactcctgacctcagacagtccgcccacttctgcctcccaaagtgctaggattacaggcttgagccaccgtgcccggctccgtgctgtctttattggaggcagaaatcactttggaggctaaggcaatggttctggagaagaagcatgaccatcccctttcccagccattgctctatcccacattgttagaaggaaatgatcccagaggactagaaagttgagaggtcaccactgctgagtcttttatatatgacagatcccacttctgggtctatatgtgcccaaaagaatggaaagcagggacaggaccagatatttgcacgcctatgttcatagcagcactagtcactatggccaaaggtggaagcaagccaagtgttcatcagctggtgaatggatgagcaaaatgtggtccatccatcccacgccccagtggaatattactcagccttaaaaaggaaggagggctgggtgtgatggctcatgcctgtaatcccaacactttgggaggctgaggcaggtgaatcacaaggtcaggagatcgagacccgcctggccaacatggtgaaaccccatttctactaaaaattagttgggtgtggtggcatgcacccgtaatcccaactactcgggaggctgaggcagaagaattgattgaaccagggaggtggaggttgcagtgagctgagatcacgccattgcactgtagcctgggggacagagtgagacttcatctcgaaaaaaaaaaaaagaaaagaaaaaaaggaaattctcttacaggctactacatggatgaaccttgaggaaattatgctaagtgaaagaagccagtcacaaaaagcaaagagacaaatactgtatgattcctgaccagaggactcctagaatagttaaattcataaagacaggaagttgaatggtggtcgttagggggttggggtcgggaaggggagttagtgtttaatgggtgcagggtttcagtttgggatgatgaaaaagttctgtgcatggatgatgctgatggttgtacaacagtgtgaatgcactgagtgccactgaactgtactgttaaacatggttaatacggtaaattttgttatatatattttgccacaacttattataatatataaatatatattttgagacagagtttcgctcttgttgccgaggctggagtgcaatggtgtgatcttggttcactgcaacctccacctcccgggttcaagtgattctcctgcctcagtctcccgaatagctgggactacaggtgcccacaaccacgcccagctaattctgtatttttagtagagatggggtttcaccatgttggtcaggcctggtctcaaactcctgacctcaggtgatccacctgcctcggcctcccaaagtgctggggttacaggcatgagccaccgcgcccggccttttgccacaatttataaacaagaatgaattctaacgttcatattaattgaagctaacatgacacacatagcataaacaggtgtctaagcggccaggcgcggtggctcacgcctatgatcccagcactttgggaggccgaggcaggtggatcacttgaggtcaggagtttgagaccaggcctgaccaacatggtgaaacccagcctctactgaaaacacaaaaattagccaggcgtggtggcacgtgcctgtaatcccagctacttgggaggctaaggccggagaattgcttgaacctgggaggcagaggttgcagtgagccgagattgcgccattgcattccagcctgggagacagagcgagacaccatctaaaaaaaaaaaaaaaaaaaaagtgactaagcgaggggtatggtggggtgtggcgtggtgggatgggcctggcttttatgcctagaccaacgtgcggcctgggcaattatctaattatcggttgtctaattgcccagcgtcacacatttctcacctgtaaaatgggtatgacagtctctgccctcccactgcccggggttgctgtacggcctgcgagagcgggtttgggaaagctctttgtcaactgctgtgcggaattgatggggtggccacacttcaatgccttgactcaggggtcagagctttcaagcgaccccaggcagggttacgagggcctccctggcagtggctgcttattccaggctggacctgccctacggcttgttggcgtcccgcaggcagctgctaggatggtttttgcagggcatttgggccgcagcctggatgcatacctagacctcactgtttttctcagccagggtctgggagagaatgaaacctattgttctagttatctgctgtatgtgactctctcctgtgcgtttctctcttgtgggtcttctctcctgtgcatttagggtggtatgaagtgaagagagaaaatagacacttgtggccgggcgcagtggctcacgcctggaatcccagcactttgggaggccgaggcaggtggatgacgaggtcaggagttcaagaccggcctggccaacatggcgaaaccctgactctactaaaaatacaacaattagctgggcgcaatggcaggtgcctgcaattgcagctattcgggaggctgaggcaggagaatcgcttaaacctgggaggtggaggttgcagtgagctgagatcgcgccattgcactccagcctggacgacagagtaagactctgtctcaaaaaaaaaaaaaaaaaaaggaaatgacactgatagttatctgtgttttgtggttccctgaggaacccccagttgagaagaaaggctgggacctggctgacccagaagaccccctcgacgccaacccctactccaggtttggggacccaggaacgagaggcctaagagagttagggactagttcaaggttgctcggactctcaaaacaagtccctaatgccaggccagtactgtgtggcgggcagcacgaccctccattccctctttattttgaaaacggaacagttacaggacgctagttttgacgtcgctggttgtgaatgtcatttgtggagccgtttcccagacctccgggggcaggagccacaggtttgagaggccgagcagcgccctcctttcctgagagctgaggttgcagctctggctggctctggtaagtgctctgcagccctggcatggctggaggaggggcagcagctaagtggtttctgaaaaagggcaaaaatgatgggaaaagctttgggatcctctgggaatcagagccgcagcaaaggcagctgcttgcatcgctggaagcgttttttccttgagtgccgaagggcgtccacagcgactcctgctagtgcagggcagctgctgccagggccgggcccgggaccccacggaggcggggagaccactcttctcccacacgagcccagctctcccttcgagtagcaaccgccttcaagctcacaagcacccgtgggcctggggtgtgcctgcgtctagctggtgagtccctttctttgtctgatggccaatgcagacattagcttttaagatggcatagtgagtggccaaaagccgggccctgtcacttcccagctgtgcgactgtgggcaggtccactcacctctctgtgccccagttaccttatctgaaaacggggggtagtaagagtggctgcctcaaaggtggtcgtgaggctgaagcgaacttgtggtgccctcagcctggctccttggaagcacctgggaggtgagagtggaggttgttgttactggggtttgttcttgttgctcctgcatcagccgtcctcgggggaggaggctgcagctgctgctgagattgctggtgtgtggccggaggttttcagcgtgtcgccctctctgtggagtggacgagcgcagggctgggaagcaggcacactgggtccttgtgctgctgtcctatctctttgttcttcacccctgggttgggaagcccgcagcctactgcctccctttgacagaagggactactgagaataatctggctgggtcctgggccagcgttctcccagcttccagaaagtccccagtggcgagcgggaggtgctcccaagaacttggatggatggatggatggatggatgctttgggcagagagaggagcaggggagccacaccccatgttgtctcacttgcattggggagagaagggatccttcccccagagggtaggcagtatctgttctggctttggagttgagaaagactcagatcataccacgtctctgtgggcagaatcgattcttttaggattgtcctttagtccagattgatgagtttgtgagtcttgtgtaaaccagaatcaccatctccatcacacagccaacactcgtttgcctaaatcacggtagaagttcccctgatcactgtagaatgttttgcggtgacaggtgcatcaccacgggcttaggtgcagggtacactccaggcctggcagtggagggctgtcctgaccctgttccccggcccagcccagggcacatgacccctcagttcctgtcccaccccgttccctggaagaagcttggtttccagtagggaatcaggtgcagagtgtgcagtatagattcagcgtttgtcgactgactgaatgatagcacaatcccggctgcttcctgttggctgggtttggttggactgggacccgtcagaggaaaaggcaacgccgctgacaaagaacattgccgaaaggttcatgggaggctccggctaacaggtgctctcttgctgggctgcctaacgagcagcccctattcttattcttagcttattcttggagaccatagacatccctgggacagccaggcatgggtatgacctgggtcttattcacactgcattttggggttcctgagctgcttgtttgagcgagaggtgcttcaggttcaggtcttatgcctagccccttgggtgagagggcctattctgattggcccccaggccctgctgtggagtctgggtctgagttgaactgctgagaaagagccccagacctccagcatcgtggtggagcactggagatgctctggagccagcctgcctggggtcaagtccgggttccatctctgactgtgtgacctcggggacgtgccataactgctctgtgcctcggtctcctcatcggtgaagtatttccctcttagggatgttgtgggaatgaagtgggtgaaggaatgcgagtcctgagaaccgtgtctgctttgtgcacgtgctcagacgcatcaacgattctgcttctcattcgcttctggtgccttttaagtgctgccagggctgtccgcactgtgaacggtccttgacggggtgttatcttcagaaagggaagactagcacccggccccccaggcttccaaagcatcatccatgcaaccatgttggctttcaattccttggagttaaggctgacggccatctggttctaacccggcctcctgtcttcctgtcccactgacttcccgttcttcagctgctctaggcttccctgtctgtctccagaccctagcccacctctgttcccttcccaggctcagctcatccatcaccaactgccatggacccctcttcagcaccctgccccctcctgcagtccctccgcccagccagtacctggtttctgtctcagcggggagctgactcctctctgtgcccccagcgcagggctggactctgaggaggaggactcagtagataggtattgagtgatgagatgagggaatcggctttctgtggccgggaacactcctgctgcagggggtccacctgatgggtgagtcagagaaagactcaggcctgttgaaagtggatcaacaggcaggcagggagatggccagtagccagccgtccgtcctgttcacagcctgcggagtggtgaggctgcctctgtgttttcatggatctgagattcagaacgtagctggtttacagccatggcccagttgtgtgctctggagtttcactgcctgaattttaacttgaaaatgtaggacttgggagtctctctgagccattctggcttgggagattgcctgattatatatttcaaaaaaaaaaaaaaagaaaatgcaggacttgagaagcctctcatttcttctgcggctgttttccggaatgtagccactgctggaacagtaatctccctaacttcctatggaaatggcaattagaagggtctgattgctcttatttccccatgtgtgcagctgctgctgctgctgctgctgctgcttctttttttttttttttttttttttttgagacagagtttcactctgttgcccaggctggagtgcagtggcacagtctcagctcactgtaacctctacatcctgggttcaagcgattctcctgcctcagcctcccgagtagctgggattacaggcgcccgacaccacgcccggctaatttttgtattttttttagtagagatgggatttcaccatgttggccaggctggtctcgaactcctgacctcaggtgatccacctgccttggcctcccaaagtgctgggattacaggcgtgagccacgcgcccaggccagtacagcttcttcataaggagatggaccaggaaaggtccctgcccaggaggaggtcacagggtgcgggagagataaatcagtgacagatagcaattgctggaccacatggtaggctgtgtgggacaggcggtcagtgggctgggccactgtgtggaggacagcggggagcatgagcagggcagggatctgggggcttcatggaggaggcggcatcagtgctggatcctgaggggaagtagcatctgagtggtgataggacttgtgcaagggtagacagaggaaaaagcccttaggtggagacccgatgggaatagaggctatgggagggatgtatgggccacccctgggtgccagggagtggggatgcccagccagagggaggggaagcatggggatggggcaggatgggagtggaaaatagcatcagctcatgtgtccaactacacatgctgctgccagcggccagctgatctctaggtgtttaggcctagaagaccaaccagctccaaatcacttaaagcctaaacgttccctgtctctactaaaaatacaaacattagccacgcatggtggcgggcgcctgtaatcccagctacttgggaggctgagggaggagaatcgcttgaacctgggaggtggaggttgcagtgagcagagattgccccattgcactctagtctgggcgacagagtgagacacacagacacacacacacacacacacacacacacacacacacacacacacacacacacacacgcctaaacattcaaggccaggatgcttgacagatgttgattcataaaaatgacaaaaagcacaaaatccaaaatctcgtataagctcagtggctgtggcagcgaggttgaagagcaaaggcaggccgggcacctggctgatgatgtgtggacccgttgcacagcagggccccgcagtgcggtgtgggtgtgggtgggccagtctctgccgctcaccctattccagggacacagtctgcttggctcttctggactgagccatcctcatcaccgagatcctccctgaattcagcccacgacagccaccccggccgttttccttgttctgtgtggggagggaggcagcgcggtggttatcaacctcaccctgcagaggaggcacctgaggcccagagacgaggagggatgggtctaacccagaaccacagatggctctgagccgggggcctgtccaccctcccaggccgacgtcagtggccgcaggactgcctgggccctgctaggcctgctcacctctgaggcctctggggtgagaggttcagtcctggaaacacttcagttctagggggctgggggcagcagcaagttggagttttggggtaccctgcttcacagggcccttggcaaggagggcaggtggggtctaaggacaagcagtccttactttgggagtcaaccccggcgtggtggctgctgcaggttgcacactgggccacagaggatccagcaaggatgaagaaatggagcagcacagacttgggggcagctgcggacccactccaaaaggacacctgcccagaccccctggatggagaccctaactccaggccacctccagccaagccccagctctccacggccaagagccgcacccggctctttgggaagggtgactcggaggaggctttcccggtggattgccctcacgaggaaggtgagctggactcctgcccgaccatcacagtcagccctgttatcaccatccagaggccaggagacggccccaccggtgccaggtaagtccgcgtctggagcccccctccctgctgggagcccagctggccatggagatgccacagggtggtctggcttctgggctaaatgtcacaaagccagggggctggagagccttaggggtggtctggtccagcgtccttcctcatgtgacctcgtgggatgtgcagtcacgggggctggtgtctgtgctgggtctaggtgtccacgcccgcaatgcctaccagccacagacacttggacttgaagtctaaaagctcaagggcaggaggcttttggagagcacagcacagctccagtgagctgcaaggcagggcagggagggccacaggctggctgacttctggggagtgtgaggccaccttttcccttagaggggctgtctacacccctgcctccacctccctccgtccccaccaggctcctgcctcccgagctcccgagcaggcagagaagccagtggtctgggagtaggagggtgactttctagatggtgtctatagacagggtggggacagaatggggacacatgccctccactgtccctgttacattgcttttctggacagtcacctagactgaggggcagcttttatatcatttttcccctttttggtttgccttgggatttagtcgtgttcccttgacaagctccgaaggcctcagggccgaggggaggccagggtatgagacgagcgtgttttctggcccacaggctgctgtcccaggactctgtcgccgccagcaccgagaagaccctcaggctctatgatcgcaggagtatctttgaagccgttgctcagaataactgccaggatctggagagcctgctgctcttcctgcagaagagcaagaagcacctcacagacaacgagttcaaaggtggccccagcgctgggctcggggagggccccagccctggcctgccctgaccctcccttatgtctttcagaccctgagacagggaagacctgtctgctgaaagccatgctcaacctgcacgacggacagaacaccaccatccccctgctcctggagatcgcgcggcaaacggacagcctgaaggagcttgtcaacgccagctacacggacagctactacaagggtgaggagggcggcggggccgggcatggctcagcccgcagcaccgggaagcaggggggcatggttgtccctgggcctccttgcttctctgggatccttactccctgtcccagccactgcgttggtggctcctaatcctagggggtccctgcctctcccatctgctggcttgatttctcctggtcctgggggtctctgcctccccgatctgatgtctcctctcttgaccctgagaagtccctgcctccccctgctgactggatggtccctgtccctggaagtcacagcctctggcctttctctctgctgctgttccttgcccccggggcaattttgactcctctggcttccaacccgttatttcctgttcccaggggtctcctgtctcaggaccttgctgggaccccttgggggaccctggcctggcctcctgcagtgggggggtcctccaggcactttctgcccagttcctcctgcagcagctgctgcctgcccagagcccttccccagcacctgtcccggcagccccacaggaccgtgaccacgaagccaaccgtgcgcgtcctctgtaggccagacagcactgcacatcgccatcgagagacgcaacatggccctggtgaccctcctggtggagaacggagcagacgtccaggctgcggcccatggggacttctttaagaaaaccaaagggcggcctggattctacttcggtagggagacagtgtggcagaccctgatctttttggcttttgctaaggggaggtttgggcagagacagagggagtttggaggccggtggttcaggggccagctggatctcactcctgaggcccacctgggccctgtgttcatgcaggtgaactgcccctgtccctggccgcgtgcaccaaccagctgggcatcgtgaagttcctgctgcagaactcctggcagacggccgacatcagcgccagggactcggtgggcaacacggtgctgcacgccctggtggaggtggccgacaacacggccgacaacacgaagtttgtgacgagcatgtacaatgagattctgatgctgggggccaaactgcacccgacgctgaagctggaggagctcaccaacaagaagggaatgacgccgctggctctggcagctgggaccgggaagatcggggtaagagggggcttcggctcaggctggtgcggtgcggggctgatggcatgggagaggactgcctgactcactgcgggagcctggcgtcgctatctgtgtgtgcgggactctgattctgtcataccagcctgtagggctgttagaataagtctgagaaattgggagccacagggcagaaccctgcaatggccaacgtgccattttgaatttccagctctgagtatcagcaacaagacatggggtggggtagggtgctgggcaatggaggagggactgcctagggtggaacagaagaatagctgttgggctgggcacggtgactcactcttgtaatcccagcattttgggaggccgacgtgggtggatcacctgaggttaggagttcgagaccagcctgaccaacctggtgaaacctctactaaatatacaaaaattagccaggcatggtggcaggtgcctacaattccagctactcaggaggctgaggcacaaacatcacttgaacttgggaggcggaggtggcagtgagccaagattttgccaccgcactctagcctgtgtgacagagcaagactctgtctcaaaaaaaaaaaaaaaggaaaaagaaaaaagctgttggtgtttttccatggcaggcaggagcatggcaggcaggagctttaggtaacaaggctgatggctccagctcccagctccagctggtggctcctggtgacaggcctccagctcttggcctcaagtgatccttccacctcagcctcccaagtagctgggattacaggcatgagccaccccatctggctctcatttcttgcattctctttctttctttctggcttgaggttatcgagaatggaccaccgctgtccttcatggtgagatggtagagctggggcctcgccgtgaggggattgtgggcctgatatggtgcaggtagtatctgaggcagctggctggttgacgtttgtgtgttttgtttttttttttttttttagatgaggtttcgctcttgttgcccaggctggagagcagtggcacaatctcggctcactgcaacctctgcctatcaggttcaagtgattctcctgtctcggcctctcaagtagccgggattacaggaacacgccaccatgcccggctaattttttttttgtattttcagtaaaaacaggattttgccatgttggccaggctggtctcaaaatcctgacctcaggtgatccacccgcctcagcctcccaaagtgctgggattacaggcatgagccacccgtgcccggccggctggttgatctcagtggtggtcaggagtgggtggggactcgcctggggcttaggtggggccaccagctgggctgggaagcagagctggttgttgaggtactgtctgaggctgagcctggggctggcctctgacgggctcttgctccccgggggcaggtcttggcctatattctccagcgggagatccaggagcccgagtgcaggcacctgtccaggaagttcaccgagtgggcctacgggcccgtgcactcctcgctgtacgacctgtcctgcatcgacacctgcgagaagaactcggtgctggaggtgatcgcctacagcagcagcgagacccctgtgagtggctggggcacagccagggagggcctcagggcctctgcacccaagccccaatcccagcccctggtccagctccagctggcttctcaggagggaaagcctgctgcgcccgggcccaggccctgcagcctcacgttccccactcatgcccactgaattttccctaagcatagcaaccatacgtgattatcatcccataaaaacagaaacgtttcagagggacatggacaaaaggaccctccttttatactatttaaaaatgcacagtttcattttgtttacataaatgagatcagactatacacaatgtacaacaaccttttttttttttcacttgatggcagggcgtgtagatttttctttttttttttgagacgaagttttgctcttgttacccaggctggagtgaaatggtgccatcccggctcactgcaacctctatctcccgggttcaagcgattctcctcgaatccgaagtagctgggattacaggcatgcgccaccaggccctgctaattttttgtatttaatagagacaggatttctccatgttggtcagggtggtctcgaactcttgacctcaggtgatccgccctccttggcttcccaaagtgctgggatcacaggtgtgaaccactgcgccaggccaagaacttatttttgtgtaggtgtgaagtaggcatcttacttaaatattttggctccaaatgaatgtcttagtgttacgtagtgagtaatccatcctgccacgctgtttggaaaggccaccttatctgtcccttctttctaaggtgatgctctgagctcctaaggcagacttgggggctagagtctgtgccatcagcagtgaggggcttccacgacatctcacaggtcagaggttgcgtttacaggagcagagtccggggctgggaaaggcctggtctgctctgcctcccctgggctgccatgctgaacctgggcctccaactcagagtgctggatacaagtgttcccagaggagaggtccagataggaggtggcctcaacaaggactgcagtatttgacctgggggagaggctctgggaccaccactgacatcttcatgtctctaaaggctctcagggacaaggagtgtggacttgtcctggggaccctagggcagagccaggaccactagtggaaagtagagaagaccaaagaagaggtattccctacaggcagtgagtctccataggcctcttgaggcagtaaggagtttcccattcccaaaggcattcaagaagacactgatcaggaacctctttgagggagcttaagtttggggtgggggttggactcgatggcctgagggaggctgggatgatctgattttggctcatcagtctcagggatacttgaacttatttttattttattttattttatattttgagacagagtcttgctctgtcacccaggttggagtgcaatggcgtgatctcagctcactgcaacttctgcttcctggggttcaagcagttctcccacctcagcctcccaagtagctgggattacaggcacccaccaccatgcctggctaatttttgtatttttgtagagaaggagtttcaccacgttggccaagctggtcttgaactccagacttcaagtgatccacctgcctcggcctcccagagtgctgggattacaggcgtgagccactacacccggcctatttgaactttatcaaagtctctggatatgagacatttgccccaaagcatacttgtaatgatggcatgaggcactgggccctcctggggcaggaagggcctcctagttccctgcctccctgccgccctgcctgacccagggctggaaacgtgagaagtgaggacccagaggctctttcctgcctgccctgagcccctcatgcccaggctctgcctaagccaactacttcccattactgtgggctctcgggagggagttattagacacaacgggcagtgcggtgggccattaagtgagcacttaagagcttgtccagtttcaccccattcactgcacctctggggacactgaggccaagagggcaggtccctccgtgagccgcggcagtgctgggaccagccccaggctatggctgccggctggctcagacctcccatctcacctgctccgtgggctgaggactgtgcgggccacatggctgtgaggggcaccacgggctggtgtgggcgtgcgaggagttcctgctgcaggagggaacctcacttctctccccaccccctagaatcgccacgacatgctcttggtggagccgctgaaccgactcctgcaggacaagtgggacagattcgtcaagcgcatcttctacttcaacttcctggtctactgcctgtacatgatcatcttcaccatggctgcctactacaggcccgtggatggcttggtgcggccagaggctcaggcctcgtgggcgagggtgtgggtggtggggaaggggtgtggacatttcgggagacctccccgaccccaggcccaggctctgccctggactccttcccagcttgcgggagcgatggatggagaacgtggagaacctcgtatccctgcgcccatctcccctgcctcaggctgtacaggagacccgcccccttcccgcttctcagttcctctcctttaaccttgaggtcctgtggggctgagtgtgtggtgactcaggtccctgattgtagacggggtgtactcggttagaaagcatgcaggggccgggcatggtggctcatgcctgtaatcccagcactttgggaggctgaggtgggcagatcacctgaggtctggagtttgagaccagcctgaccaacatggtgaaaccccgtctctactaaaaacaccaaattaactgggtgtggtggagcctgcctgtaatcccagctactcagggaggctgagacaggagaatcgcttaaaccttggaggcagaggttgtgatgagctgagatggcaccactgcactccaggctggtcaacaagagtgaaactctgtctcaaaaaaaaaaaaagaaaaatcacgcaggaatttgggctcgggacagggctcacccctggcctgggggtccccagggatgtgggctggtgtctaagcccagagcccaccatcatcctgcttgcctgccctctttcattcactcacttgctcattattcattccctggatttagacttttgagcagctctgtgccaggccctgggccatccatcaaatcagcctaagaccagcctttttcctctgccaagagccaagacttcatcaaacttctggacttagtccttcgtgtctgatacccaggacacttaatttgctgcttttgtttccagggcactttacaagtttacttacttacttaatttttgtttttttgagatggagtctcgctctatcacccaggctggagtgcagtggcgcaatctctgctcactgcaacctccacctcccgggttcaagtgactcttctgcctcggcctcccgaatagctgggactacaggcacccaccaacatgccaagcttatttttatatttttagtagagatgggatttcaccgtattggccaggctagtcttgaactcctgacctcaagtgatcgcctgcctcggcctcccaaagtgcttggattacaggtgtgagccaccgtgcccggctgcacatttactttaaaaactcaacttcataattgcatgaaacccgatttctgtccacctattaaggccacataatgacttccttttttttttattttattttttttttttttgagacagagtctctctctgttttccaggctggagtgcagtggtgtgatctcagctcactgcaagctctgcctcctgggttcacgccattctcctgcctcagcctccctctttttttttgttttttgttttttgttttttgagacagagtctcgctctgttgcccaggctggagtgcagtggcgccaccttggctcaccgcaacctctggctccggggttcaagtgattcttctgtctcccaagtagctgggattacagccatgagctaccacgcctggctaattttgtatttttagtagagatggggtttctccatgttggtcaggctggtctcgaactctcgacctcaggtgatccgcccgcctcggcctcccaaagtgctgggattacaggcgtgagccactgcacccggccagtgacttctttttaagagaaaaatgtgctggtaaggcaagctgatgaactagtgcttaggaaatgtggatggtgacccactccaggaaatggccactgaaatacaagggtgacacccacaagtgtgtgtggcacagtctctccctccatggtcagtgggagtccctgacactcgtgggagactggccatgggctggggtggcagcgggatgtgtatggcgtggggtccatgagagtgcttccacctctccatcaccctgctgtccatcactctgctcccagccaggaggagctctgggcctgccgggacattgcttgggaggcggcacagcattgtaagatgctccgcttggcacctgcaggctgccactttggggaatcaggcccacagaggggcctccttgcgggcgctcccctaataacacactgtctttgtgtgtccttcccctgatggaggctgtgcctcctgggcagggactatggcttcatggacctggtccatgtttgttgaatgaacgaatgagtaaatggagttaccaacttctctgcatctcacagcctccctttaagatggaaaaaactggagactatttccgagttactggagagatcctgtctgtgttaggaggagtctacttctttttccgaggggtaagcgttccttcccacattgtgagtttccattatcaccaaaacaaaaagccaagaagatccctcagcgctcactcactttttaattcatcagacaca

1. An isolated population of cells comprising pluripotent stem cell-derived sensory neurons (PSC-SNs) or descendants thereof, the PSC-SNs expressing one or more of a sensory neuron marker and a pan neuronal marker.

2. The isolated population of cells of claim 1, wherein the PSC-SNs respond to a stimulus that is nociceptive and pruriceptive.

3. The isolated population of cells of claim 1, comprising cells that express one or more of TRPV1, SCN9A, MRGPRX1, and KCNQ2.

4. The isolated population of cells of claim 1, comprising cells that express CD200^{high}.

5. The isolated population of cells of claim 1, wherein at least 40% of cells in the isolated population of cells express CD200^{high}.

6. The isolated population of cells of claim 1, wherein the PSC-SNs comprise PSC-SNs that are derived from a human (hPSC-SNs).

7. The isolated population of cells of claim 1, wherein the PSC-SNs comprise pluripotent stem cell-derived nociceptive sensory neurons (PSC-NSNs).

8. A method, comprising: administering pluripotent stem cell-derived sensory neurons (PSC-SNs) to a subject, the PSC-SNs expressing one or more of a sensory neuron marker and a pan neuronal marker.

9. The method of claim 8, wherein the method is a method to treat pain.

10. The method of claim 8, wherein the method is a method to treat osteoarthritis.

11. The method of claim 8, wherein the administering comprises administering the cells to a joint of the subject.

12. The method of claim 11, wherein the joint is a knee joint.

13. The method of claim 8, wherein the pain comprises one or more of chronic pain, nociceptive pain, and pruriceptive pain.

14. The method of claim 8, wherein the method reduces expression of matrix metalloproteinase 13 (MMP13) in the subject by at least about 10%.

15. A composition for base editing target gene mutations, comprising:
a base editor; and
a guide RNA (gRNA),
the base editor and the gRNA targeting at least one gene, the at least one gene comprising SCN9A, TRPV1, MRGPRX1, or KCNQ2.

16. The composition of claim 15, wherein the gRNA comprises a sequence selected from any one of SEQ ID NOs: 82-97.

17. The composition of claim 15, wherein the gRNA comprises a spacer sequence selected from any one of SEQ ID NOs: 17, 22, 27, 32, 35, 38, 41, 44, 47, 50, 53, 56, or 59-81.

18. The composition of claim 15, wherein the base editor comprises ABE8e, ABE8e(V106W), ABE9, ABE20, ABE7.10, SaKKHABE8e, SauriCas9-ABE8e, CjCas9-ABE8e, Nme2Cas9-ABE8e, or SaCas9-ABE8e.

19. The composition of claim 15, wherein the base editor comprises Cas9 endonuclease.

20. The composition of claim 19, wherein the Cas9 endonuclease comprises Type II Cas9.
